(19) United States
(12) Patent Application Publication
(10) Pub. No.: US 2003/0235831 A1
(43) Pub. Date: Dec. 25, 2003

(54) Nucleic acids, proteins, and antibodies

(75) Inventors: Craig A. Rosen, Laytonsville, MD (US); Steven M. Ruben, Olney, MD (US); Steven C. Barash, Rockville, MD (US)

Correspondence Address: HUMAN GENOME SCIENCES INC, 9410 KEY WEST AVENUE, ROCKVILLE, MD, 20850

(73) Assignee: Human Genome Sciences, Inc., Rockville, MD

(21) Appl. No.: 10/242,355

(22) Filed: Sep. 13, 2002

Related U.S. Application Data
(63) Continuation of application No. 09/764,897, filed on Jan. 17, 2001.
(60) Provisional application No. 60/179,065, filed on Jan. 31, 2000.
(60) Provisional application No. 60/180,628, filed on Feb. 4, 2000.
(60) Provisional application No. 60/214,886, filed on Jun. 28, 2000.
(60) Provisional application No. 60/217,487, filed on Jul. 11, 2000.
(60) Provisional application No. 60/225,758, filed on Aug. 14, 2000.
(60) Provisional application No. 60/220,963, filed on Jul. 26, 2000.
(60) Provisional application No. 60/217,496, filed on Jul. 11, 2000.
(60) Provisional application No. 60/225,447, filed on Aug. 14, 2000.
(60) Provisional application No. 60/218,290, filed on Jul. 14, 2000.
(60) Provisional application No. 60/225,757, filed on Aug. 14, 2000.
(60) Provisional application No. 60/226,868, filed on Aug. 22, 2000.
(60) Provisional application No. 60/216,647, filed on Jul. 7, 2000.
(60) Provisional application No. 60/225,267, filed on Aug. 14, 2000.
(60) Provisional application No. 60/216,880, filed on Jul. 7, 2000.
(60) Provisional application No. 60/225,270, filed on Aug. 14, 2000.
(60) Provisional application No. 60/251,869, filed on Dec. 8, 2000.
(60) Provisional application No. 60/235,834, filed on Sep. 27, 2000.
(60) Provisional application No. 60/234,274, filed on Sep. 21, 2000.
(60) Provisional application No. 60/234,223, filed on Sep. 21, 2000.
(60) Provisional application No. 60/228,924, filed on Aug. 30, 2000.
(60) Provisional application No. 60/224,518, filed on Aug. 14, 2000.
(60) Provisional application No. 60/236,369, filed on Sep. 29, 2000.
(60) Provisional application No. 60/224,519, filed on Aug. 14, 2000.
(60) Provisional application No. 60/220,964, filed on Jul. 26, 2000.
(60) Provisional application No. 60/241,809, filed on Oct. 20, 2000.
(60) Provisional application No. 60/249,299, filed on Nov. 17, 2000.
(60) Provisional application No. 60/236,327, filed on Sep. 29, 2000.
(60) Provisional application No. 60/241,785, filed on Oct. 20, 2000.
(60) Provisional application No. 60/244,617, filed on Nov. 1, 2000.
(60) Provisional application No. 60/225,268, filed on Aug. 14, 2000.
(60) Provisional application No. 60/236,368, filed on Sep. 29, 2000.
(60) Provisional application No. 60/251,856, filed on Dec. 8, 2000.
(60) Provisional application No. 60/251,868, filed on Dec. 8, 2000.
(60) Provisional application No. 60/229,344, filed on Sep. 1, 2000.
(60) Provisional application No. 60/234,997, filed on Sep. 25, 2000.
(60) Provisional application No. 60/229,343, filed on Sep. 1, 2000.
(60) Provisional application No. 60/229,345, filed on Sep. 1, 2000.
(60) Provisional application No. 60/229,287, filed on Sep. 1, 2000.
(60) Provisional application No. 60/229,513, filed on Sep. 5, 2000.
(60) Provisional application No. 60/231,413, filed on Sep. 8, 2000.
(60) Provisional application No. 60/229,509, filed on Sep. 5, 2000.
(60) Provisional application No. 60/236,367, filed on Sep. 29, 2000.
(60) Provisional application No. 60/237,039, filed on Oct. 2, 2000.
(60) Provisional application No. 60/237,038, filed on Oct. 2, 2000.
(60) Provisional application No. 60/236,370, filed on Sep. 29, 2000.
(60) Provisional application No. 60/236,802, filed on Oct. 2, 2000.
(60) Provisional application No. 60/237,037, filed on Oct. 2, 2000.
(60) Provisional application No. 60/237,040, filed on Oct. 2, 2000.
(60) Provisional application No. 60/240,960, filed on Oct. 20, 2000.
(60) Provisional application No. 60/239,935, filed on Oct. 13, 2000.
(60) Provisional application No. 60/239,937, filed on Oct. 13, 2000.
(60) Provisional application No. 60/241,787, filed on Oct. 20, 2000.
(60) Provisional application No. 60/246,474, filed on Nov. 8, 2000.
(60) Provisional application No. 60/246,532, filed on Nov. 8, 2000.
(60) Provisional application No. 60/249,216, filed on Nov. 17, 2000.
(60) Provisional application No. 60/249,210, filed on Nov. 17, 2000.
(60) Provisional application No. 60/226,681, filed on Aug. 22, 2000.
(60) Provisional application No. 60/225,759, filed on Aug. 14, 2000.
(60) Provisional application No. 60/225,213, filed on Aug. 14, 2000.
(60) Provisional application No. 60/227,182, filed on Aug. 22, 2000.
(60) Provisional application No. 60/225,214, filed on Aug. 14, 2000.
(60) Provisional application No. 60/235,836, filed on Sep. 27, 2000.
(60) Provisional application No. 60/230,438, filed on Sep. 6, 2000.
(60) Provisional application No. 60/215,135, filed on Jun. 30, 2000.
(60) Provisional application No. 60/225,266, filed on Aug. 14, 2000.
(60) Provisional application No. 60/249,218, filed on Nov. 17, 2000.
(60) Provisional application No. 60/249,208, filed on Nov. 17, 2000.
(60) Provisional application No. 60/249,213, filed on Nov. 17, 2000.
(60) Provisional application No. 60/249,212, filed on Nov. 17, 2000.
(60) Provisional application No. 60/249,207, filed on Nov. 17, 2000.
(60) Provisional application No. 60/249,245, filed on Nov. 17, 2000.
(60) Provisional application No. 60/249,244, filed on Nov. 17, 2000.
(60) Provisional application No. 60/249,217, filed on Nov. 17, 2000.
(60) Provisional application No. 60/249,211, filed on Nov. 17, 2000.
(60) Provisional application No. 60/249,215, filed on Nov. 17, 2000.
(60) Provisional application No. 60/249,264, filed on Nov. 17, 2000.
(60) Provisional application No. 60/249,214, filed on Nov. 17, 2000.
(60) Provisional application No. 60/249,297, filed on Nov. 17, 2000.
(60) Provisional application No. 60/232,400, filed on Sep. 14, 2000.
(60) Provisional application No. 60/231,242, filed on Sep. 8, 2000.
(60) Provisional application No. 60/232,081, filed on Sep. 8, 2000.
(60) Provisional application No. 60/232,080, filed on Sep. 8, 2000.
(60) Provisional application No. 60/231,414, filed on Sep. 8, 2000.
(60) Provisional application No. 60/231,244, filed on Sep. 8, 2000.
(60) Provisional application No. 60/233,064, filed on Sep. 14, 2000.
(60) Provisional application No. 60/233,063, filed on Sep. 14, 2000.
(60) Provisional application No. 60/232,397, filed on Sep. 14, 2000.
(60) Provisional application No. 60/232,399, filed on Sep. 14, 2000.
(60) Provisional application No. 60/232,401, filed on Sep. 14, 2000.
(60) Provisional application No. 60/241,808, filed on Oct. 20, 2000.
(60) Provisional application No. 60/241,826, filed on Oct. 20, 2000.
(60) Provisional application No. 60/241,786, filed on Oct. 20, 2000.
(60) Provisional application No. 60/241,221, filed on Oct. 20, 2000.
(60) Provisional application No. 60/246,475, filed on Nov. 8, 2000.
(60) Provisional application No. 60/231,243, filed on Sep. 8, 2000.
(60) Provisional application No. 60/233,065, filed on Sep. 14, 2000.
(60) Provisional application No. 60/232,398, filed on Sep. 14, 2000.
(60) Provisional application No. 60/234,998, filed on Sep. 25, 2000.
(60) Provisional application No. 60/246,477, filed on Nov. 8, 2000.
(60) Provisional application No. 60/246,528, filed on Nov. 8, 2000.
(60) Provisional application No. 60/246,525, filed on Nov. 8, 2000.
(60) Provisional application No. 60/246,476, filed on Nov. 8, 2000.
(60) Provisional application No. 60/246,526, filed on Nov. 8, 2000.
(60) Provisional application No. 60/249,209, filed on Nov. 17, 2000.
(60) Provisional application No. 60/246,527, filed on Nov. 8, 2000.
(60) Provisional application No. 60/246,523, filed on Nov. 8, 2000.
(60) Provisional application No. 60/246,524, filed on Nov. 8, 2000.
(60) Provisional application No. 60/246,478, filed on Nov. 8, 2000.
(60) Provisional application No. 60/246,609, filed on Nov. 8, 2000.
(60) Provisional application No. 60/246,613, filed on Nov. 8, 2000.
(60) Provisional application No. 60/249,300, filed on Nov. 17, 2000.
(60) Provisional application No. 60/249,265, filed on Nov. 17, 2000.
(60) Provisional application No. 60/246,610, filed on Nov. 8, 2000.
(60) Provisional application No. 60/246,611, filed on Nov. 8, 2000.
(60) Provisional application No. 60/230,437, filed on Sep. 6, 2000.
(60) Provisional application No. 60/251,990, filed on Dec. 8, 2000.
(60) Provisional application No. 60/251,988, filed on Dec. 5, 2000.
(60) Provisional application No. 60/251,030, filed on Dec. 5, 2000.
(60) Provisional application No. 60/251,479, filed on Dec. 6, 2000.
(60) Provisional application No. 60/256,719, filed on Dec. 5, 2000.
(60) Provisional application No. 60/250,160, filed on Dec. 1, 2000.
(60) Provisional application No. 60/251,989, filed on Dec. 8, 2000.
(60) Provisional application No. 60/250,391, filed on Dec. 1, 2000.
(60) Provisional application No. 60/254,097, filed on Dec. 11, 2000.
(60) Provisional application No. 60/231,968, filed on Sep. 12, 2000.
(60) Provisional application No. 60/226,279, filed on Aug. 18, 2000.
(60) Provisional application No. 60/186,350, filed on Mar. 2, 2000.
(60) Provisional application No. 60/184,664, filed on Feb. 24, 2000.
(60) Provisional application No. 60/189,874, filed on Mar. 16, 2000.
(60) Provisional application No. 60/198,123, filed on Apr. 18, 2000.
(60) Provisional application No. 60/227,009, filed on Aug. 23, 2000.
(60) Provisional application No. 60/235,484, filed on Sep. 26, 2000.
(60) Provisional application No. 60/190,076, filed on Mar. 17, 2000.
(60) Provisional application No. 60/209,467, filed on Jun. 7, 2000.
(60) Provisional application No. 60/205,515, filed on May 19, 2000.
(60) Provisional application No. 60/259,678, filed on Jan. 5, 2001.

(51) Int. Cl. C12Q 1/68; C07H 21/04; C12N 9/00; C12P 21/02; C12N 5/06

(52) U.S. Cl. 435/6; 435/69.1; 435/183; 435/320.1; 435/325; 536/23.2

(57) ABSTRACT

The present invention relates to novel excretory system related polynucleotides and the polypeptides encoded by these polynucleotides herein collectively known as “excretory system antigens,” and the use of such excretory system antigens for detecting disorders of the excretory system, particularly the presence of cancer of excretory system tissues and cancer metastases. More specifically, isolated excretory system associated nucleic acid molecules are provided encoding novel excretory system associated polypeptides. Novel excretory system polypeptides and antibodies that bind to these polypeptides are provided. Also provided are vectors, host cells, and recombinant and synthetic methods for producing human excretory system associated polynucleotides and/or polypeptides. The invention further relates to diagnostic and therapeutic methods useful for diagnosing, treating, preventing and/or prognosing disorders related to the excretory system, including cancer of excretory system tissues, and therapeutic methods for treating such disorders. The invention further relates to screening methods for identifying agonists and antagonists of polynucleotides and polypeptides of the invention. The present invention further relates to methods and/or compositions for inhibiting the production and function of the polypeptides of the present invention.

### STATEMENT UNDER 37 C.F.R. § 1.77(b)(4)

[0001] This application refers to a “Sequence Listing” listed below, which is provided as an electronic document on two identical compact discs (CD-R), labeled “Copy 1” and “Copy 2.” These compact discs each contain the file “PC003C1_seqList.txt” (2,329,258 bytes, created on Sep. 13, 2002), which is hereby incorporated in its entirety herein.

[0002] The Sequence Listing may be viewed on an IBM-PC machine running the MS-Windows operating system.

### FIELD OF THE INVENTION

[0003] The present invention relates to novel excretory system related polynucleotides, the polypeptides encoded by these polynucleotides herein collectively referred to as “excretory system antigens,” and antibodies that immunospecifically bind these polypeptides, and the use of such excretory system polynucleotides, antigens, and antibodies for detecting, treating, preventing and/or prognosing disorders of the excretory system, including, but not limited to, the presence of cancer of excretory system tissues and cancer metastases. More specifically, isolated excretory system nucleic acid molecules are provided encoding novel excretory system polypeptides. Novel excretory system polypeptides and antibodies that bind to these polypeptides are provided. Also provided are vectors, host cells, and recombinant and synthetic methods for producing human excretory system polynucleotides, polypeptides, and/or antibodies. The invention further relates to diagnostic and therapeutic methods useful for diagnosing, treating, preventing and/or prognosing disorders related to the excretory system, including cancer of excretory system tissues, and therapeutic methods for treating such disorders. The invention further relates to screening methods for identifying agonists and antagonists of polynucleotides and polypeptides of the invention. The invention further relates to methods and/or compositions for inhibiting or promoting the production and/or function of the polypeptides of the invention.

### BACKGROUND OF THE INVENTION

[0004] The Human Excretory System is comprised of specialized organs and body tissues responsible for the removal of metabolic wastes and the retention of the proper amounts of water, salts, and nutrients. Components of this system include liver, lungs, skin, and the urinary system. All of these organs work synergistically to keep the body's water, salts, and nutrients level properly balanced.

[0005] The urinary system is a subgroup of organs, consisting of the kidneys, ureters, bladder, and uretha, specialized in removing waste materials and water from the blood. This waste is generated from the normal breakdown of food and other energy sources and is translated into urine as it passes through the kidneys. The kidneys perform a complex chemical exchange with the blood, where waste products are filtered out into the urinary system while essential water and conserved molecules (e.g. sodium, phosphorous, and potassium) are reabsorbed into the blood.

[0006] Kidneys also release three important hormones into the body. Erythropoietin, or EPO, stimulates the production of red blood cells in bone marrow. Renin is important for regulating blood pressure. The kidneys also release the active form of vitamin D, which is essential for the maintenance of calcium in the bones and for normal chemical balance in the body.

[0007] Once waste, in the form of urine, is released from the kidneys, it travels down two thin tubes called ureters to the bladder. The bladder is a hollow, balloon-shaped organ responsible for storing urine until the nerves in the bladder cause the need for urination.

[0008] Excretory diseases most commonly affect the kidneys and the bladder. Disorders range in severity from easily treatable to life threatening. Generally, the two most common causes of kidney disease are diabetes (diabetic nephropathy) and hypertension. Diabetes is a disease resulting from an excess of sugar in the bloodstream. Damage done to the nephrons of the kidney by this sugar excess is called diabetic nephropathy. High blood pressure can damage the small blood vessels in the kidney impairing the waste removal function of these vessels.

[0009] Damage from trauma or poisons may also lead to kidney disease. For instance, interstitial nephritis may occur with an allergic reaction to a drug or as a side effect of medications and involves inflammation of the spaces between the renal tubes and glomeruli. Interstitial nephritis causes reduction in kidney function including decreased urine output and other signs of renal failure.

[0010] Kidney disease is not an exclusive result of external factors. Hereditary factors may also contribute to kidney disease. For example, polycystic kidney disease (PKD), is a genetic disorder where many cysts grow on the kidney, reducing its mass and function, and eventually resulting in kidney failure. Congenital nephrotic syndrome is an inherited disorder, primarily affecting families of Finnish origin, characterized by protein in the urine and swelling of the body. The disorder develops shortly after birth, results in infection, malnutrition, and kidney failure, and is usually fatal with the first year.

[0011] Goodpasture's syndrome is a form of rapidly progressive glomerulonephritis and pulmonary bleeding characterized by deposits of antibodies in the basement membranes of both the kidney glomerulus and the lung alveoli. It is an autoimmune disorder that may be triggered by a viral infection or inhalation of hydrocarbon solvents such as gasoline. Smoking has been found to increase the risk of developing this order. There can also be an inherited predisposition to Goodpasture's syndrome.

[0012] Kidney disease may also result from the malfunction of the body's basic functions. Nephrocalcinosis is a disorder where an excess of calcium and oxalate or phosphate is deposited in the renal tubules and interstitium resulting in reduced kidney function. Fragments of the calcium oxalate or calcium phosphate may break free from the kidney and form stones.

[0013] IgM mesangial proliferative glomerulonephritis is caused by the inflammation of the glomerulus, the enlargement of certain glomerular cells, and the IgM antibody deposits in the mesangium layer of the glomerular capillary. The disorder is characterized by edema and bloody or dark urine. The trigger for this condition is unknown but it may be the result of some type of immune response. Although IgM mesangial proliferative glomerulonephritis is rare, it can affect both adults and children and may progress to renal failure.

[0014] Membranoproliferative glomerulonephritis I and II are disorders caused by an abnormal immune response resulting in deposits of antibodies in the kidneys. Mesangial cells are increased in number and parts of the glomerular membrane changes in structure. These changes make the glomerulus permeable to protein and blood cells which may result in edema, hypertension, azotemia, or ultimately, chronic renal failure.

[0015] Unfortunately, there are no cures for kidney disease. Currently, treatment has revolved around reduction of symptoms, prevention of complications, and slowed progression of the disorder towards kidney failure, mostly through diet and medications. However, once kidney failure ensues, only dialysis or transplantation is remotely effective in prolonging life.

[0016] Several types of cancer can develop in the kidney. For example, the most common adult form of kidney cancer is hypernephroma, or renal cell cancer. This cancer affects the filtering of blood and production of urine by developing in the lining of the renal tubules. A less common form, called transitional cell cancer, develops in the lining of the bladder, ureter, or renal pelvis. Wilm's tumor, the most common intraabdominal tumor in children and the most common type of kidney tumor, develops in children usually under the age of five. The cause of this tumor is unknown, but it probably develops in the fetal tissue.

[0017] Although surgery to remove the kidney, or nephrectomy, is the most common treatment for kidney cancer, several other therapies are available as alternatives. External radiotherapy is sometimes used to kill the cancer cells and relieve pain when the cancer has spread to the bone. Chemotherapy has been used infrequently to treat kidney cancer due to its limited effectiveness. Hormone therapy may also be used with patients with advanced kidney cancer to relieve pain. Immunotherapy has recently become a more popular alternative to surgery. Currently, interleukin-2 and interferon are types of immunotherapy used to treat advanced kidney cancer.

[0018] Bladder disorders, in which muscles in the bladder weaken, can result from aging, illness, or injury. Many of these disorders result in the same symptoms, for example, problems with urination, which complicates the accuracy of clearly diagnosing these diseases. Failure to effectively treat bladder disorders may result in further damage to the urinary system, especially the kidneys, as toxin may become backed up in the kidneys.

[0019] The most common bladder disorders are urinary incontinence and urinary retention. Urinary incontinence affects women more often than men and results in the loss of bladder control. Treatments range from exercise to surgery. Urinary retention can have many causes and results in the inability to urinate. Common causes can include obstruction in the urinary system, stress, bladder muscle failure, or nerve damage, and treatment regimens usually depend on the cause.

[0020] Other bladder disorders result in painful urination such as urinary tract infections, interstitial cystitis (IC), or prostatitis. Urinary tract infections (UTI) can be caused by bacterial infection. Several species that are known to cause urinary tract infections are Escherichia coli, Staphylococcus saprophyticus, Klebsiella, Proteus mirabillis, Ureaplasma urealythicum, and Entercocci. Treatment consists of a course of antibiotics or flushing out the bacteria by consuming plenty of fluids. Urinary tract infections are more common in women than men. In interstitial cystitis, also known as painful bladder syndrome and frequency-urgency-dysuria syndrome, the bladder wall becomes inflamed and irritated, resulting in stiffening of the bladder, decreased bladder capacity, pinpoint bleeding, and, in rare cases, ulcers in the bladder lining. No cause or reliable treatment for IC has been found.

[0021] Prostatitis is the inflammation of the prostate gland that results in urinary frequency or urgency, painful urination, and lower back/genital area pain. Some cases have been shown to be caused by bacterial infection and are treatable by antibiotics. However, in most instances, prostatitis is not associated with any known infectious agent and is unaffected by antibiotic treatment.

[0022] The bladder can also be susceptible to cancer. About 90 percent of bladder cancers begin in the bladder lining and are called transitional cell carcinomas. If the cancer is confined to the lining of the bladder, e.g., superficial bladder cancer, it can be readily treated. However, the cancer can recur, and most often, it recurs as another superficial cancer.

[0023] Treatment of bladder cancer depends on the stage of the disease and if, or how deeply, the cancer has invaded the bladder wall. Surgery is the most common treatment of bladder cancer, the extent depending on the stage of the disease. Surgery to remove part or all of the bladder is called cystectomy. Superficial bladder cancer may be treated at the time of diagnosis by a transurethral resection (TUR) to remove the cancer or bum away the cancer cells with an electric current, e.g. fulguration.

[0024] Alternative therapies are available to treat bladder cancer. Either external or internal radiotherapy may be used to kill the cancer cells. Chemotherapy can also be used alone or in combination with surgery and/or radiation therapy or after TUR with fulguration to treat superficial bladder cancer. Chemotherapy can be administered intravesically through a catheter directly through the urethra or can be administered systemically through intravenous injection.

[0025] In addition, superficial bladder cancer can be treated with immunotherapy. Currently, BCG (bacille calmette-Guerin) vaccine, an anticancer drug, is placed in the bladder for several hours to stimulate the body's natural immune system. Like chemotherapy, immunotherapy can be used alone to treat superficial bladder cancer or after TUR with fulguration to help prevent the cancer from recurring. Other forms of immunotherapy are also being studied for other stages of bladder cancer.

[0026] Cancer of the bladder can also become malignant (e.g., invasive bladder cancer), growing through the bladder wall and spread to nearby organs. Most commonly, the cancer cells spread to the lymph nodes surrounding the bladder and require more aggressive treatments. For invasive bladder cancer, a radical cystectomy is the most recommended treatment where the entire bladder, nearby lymph nodes, and any surrounding organs containing cancerous cells are removed.

[0027] Diseases affecting the ureters ultimately result in damage to the kidneys. Chronic (e.g., slow, progressive) and acute (e.g., sudden) unilateral obstructive uropathy occurs when one of ureter becomes blocked, resulting in the backup of urine into the kidney. These disorders do not cause kidney failure if there are two functioning kidneys; however, they may result in permanent damage to the kidney with distention of the renal pelvis and calysces or may cause hypertension. Reflux nephropathy also causes internal kidney structure damage from the backup of urine by the malfunction of the valve-like mechanisms between the ureters and bladder. The backup of urine may expose the kidneys to pyelonephritis and may lead to chronic renal failure and end-stage renal disease if not properly treated. Treatments for these diseases may involve antibiotics (e.g., for simple reflux) or may require ureteral reimplantation or reconstructive repair.

[0028] Carcinoma of the ureter usually manifests as either transitional cell cancer or squamous cell carcinoma. This cancer is closely associated with and treated as kidney cancer. Cancer of the urethra is a rare, mostly malignant type of cancer that occurs more often in women than men. Prognosis and treatment depend on the anatomical location and the depth of invasion. Superficial tumors, located in the anterior urethra are generally curable; however, deeply invasive lesions or lesions in the posterior urethra are rarely curable by any known combinations of therapy.

[0029] The discovery of novel human excretory system associated polynucleotides and the polypeptides encoded by them satisfies a need in the art by providing new compositions which are useful in the diagnosis, and treatment, prevention and/or prognosis of diseases or disorders of the urinary system, including, but not limited to, renal disorders (e.g., kidney failure, nephritis, blood vessel disorders of kidney, metabolic and congenital kidney disorders, urinary disorders of the kidney, autoimmune disorders, sclerosis and necrosis, and electrolyte imbalance, and kidney cancer), bladder disorders (e.g, urinary tract infection, bladder obstruction, urination disorders, and bladder cancer), urether disorders (e.g., obstruction of the ureter and ureter cancer), urethra disorders (e.g., obstruction of the urethra and urethra cancers) and/or those disorders as discribed under “Urinary System Disorders” below.

### SUMMARY OF THE INVENTION

[0030] The present invention relates to novel excretory system related polynucleotides, the polypeptides encoded by these polynucleotides herein collectively referred to as “excretory system antigens,” and antibodies that immunospecifically bind these polypeptides, and the use of such excretory system polynucleotides, antigens, and antibodies for detecting, treating, preventing and/or prognosing disorders of the excretory system, including, but not limited to, the presence of cancer of excretory system tissues and cancer metastases. More specifically, isolated excretory system nucleic acid molecules are provided encoding novel excretory system polypeptides. Novel excretory system polypeptides and antibodies that bind to these polypeptides are provided. Also provided are vectors, host cells, and recombinant and synthetic methods for producing human excretory system polynucleotides, polypeptides, and/or antibodies. The invention further relates to diagnostic and therapeutic methods useful for diagnosing, treating, preventing and/or prognosing disorders related to the excretory system, including cancer of excretory system tissues, and therapeutic methods for treating such disorders. The invention further relates to screening methods for identifying agonists and antagonists of polynucleotides and polypeptides of the invention. The invention further relates to methods and/or compositions for inhibiting or promoting the production and/or function of the polypeptides of the invention.

### DETAILED DESCRIPTION

[0031] Tables

[0032] Table 1A summarizes some of the polynucleotides encompassed by the invention (including cDNA clones related to the sequences (Clone ID NO: Z), contig sequences (contig identifier (Contig ID:) and contig nucleotide sequence identifier (SEQ ID NO: X)) and further summarizes certain characteristics of these polynucleotides and the polypeptides encoded thereby. The first column provides a unique clone identifier, “Clone ID NO: Z”, for a cDNA plasmid related to each excretory system associated contig sequence disclosed in Table 1A. The second column provides a unique contig identifier, “Contig ID:” for each of the contig sequences disclosed in Table 1A. The third column provides the sequence identifier, “SEQ ID NO: X”, for each of the contig polynucleotide sequences disclosed in Table 1A. The fourth column, “ORF (From-To)”, provides the location (i.e., nucleotide position numbers) within the polynucleotide sequence of SEQ ID NO: X that delineate the preferred open reading frame (ORF) shown in the sequence listing and referenced in Table 1A as SEQ ID NO: Y (column 5). Column 6 lists residues comprising predicted epitopes contained in the polypeptides encoded by each of the preferred ORFs (SEQ ID NO: Y). Identification of potential immunogenic regions was performed according to the method of Jameson and Wolf (CABIOS, 4:181-186 (1988)); specifically, the Genetics Computer Group (GCG) implementation of this algorithm, embodied in the program PEPTIDESTRUCTURE (Wisconsin Package v10.0, Genetics Computer Group (GCG), Madison, Wis.). This method returns a measure of the probability that a given residue is found on the surface of the protein. Regions where the antigenic index score is greater than 0.9 over at least 6 amino acids are indicated in Table 1A as “Predicted Epitopes.” In particular embodiments, excretory system associated polypeptides of the invention comprise, or alternatively consist of, one, two, three, four, five or more of the predicted epitopes described in Table 1A. It will be appreciated that depending on the analytical criteria used to predict antigenic determinants, the exact address of the determinant may vary slightly. Column 7, “Tissue Distribution” shows the expression profile of tissue, cells, and/or cell line libraries, which express the polynucleotides of the invention. The number in column 7 (preceding the colon), represents the tissue/cell source identifier code corresponding to the code and description provided in Table 4. Expression of these polynucleotides was not observed in the other tissues and/or cell libraries tested. For those identifier codes in which the first two letters are not “AR”, the second number in column 7 (following the colon) represents the number of times a sequence corresponding to the reference polynucleotide sequence (e.g., SEQ ID NO: X) was identified in the tissue/cell source. Those tissue/cell source identifier codes in which the first two letters are “AR” designate information generated using DNA array technology. Utilizing this technology, cDNAs were amplified by PCR and then transferred, in duplicate, onto the array. Gene expression was assayed through hybridization of first strand cDNA probes to the DNA array. cDNA probes were generated from total RNA extracted from a variety of different tissues and cell lines. Probe synthesis was performed in the presence of ³³P dCTP, using oligo(dT) to prime reverse transcription. After hybridization, high stringency washing conditions were employed to remove non-specific hybrids from the array. The remaining signal, emanating from each gene target, was measured using a Phosphorimager. Gene expression was reported as Phosphor Stimulating Luminescence (PSL) which reflects the level of phosphor signal generated from the probe hybridized to each of the gene targets represented on the array. A local background signal subtraction was performed before the total signal generated from each array was used to normalize gene expression between the different hybridizations. The value presented after “[array code]:” represents the mean of the duplicate values, following background subtraction and probe normalization. One of skill in the art could routinely use this information to identify normal and/or diseased tissue(s) which show a predominant expression pattern of the corresponding polynucleotide of the invention or to identify polynucleotides which show predominant and/or specific tissue and/or cell expression. Column 8, “Cytologic Band,” provides the chromosomal location of polynucleotides corresponding to SEQ ID NO: X. Chromosomal location was determined by finding exact matches to EST and cDNA sequences contained in the NCBI (National Center for Biotechnology Information) UniGene database. Given a presumptive chromosomal location, disease locus association was determined by comparison with the Morbid Map, derived from Online Mendelian Inheritance in Man (Online Mendelian Inheritance in Man, OMIM™. McKusick-Nathans Institute for Genetic Medicine, Johns Hopkins University (Baltimore, Md.) and National Center for Biotechnology Information, National Library of Medicine (Bethesda, Md.) 2000. World Wide Web URL: http://www.ncbi.nlm.nih.gov/omim/). If the putative chromosomal location of the Query overlapped with the chromosomal location of a Morbid Map entry, an OMIM identification number is provided in Table 1A, column 9 labeled “OMIM Disease Reference(s)”. A key to the OMIM reference identification numbers is provided in Table 5.

[0033] Table 1B summarizes additional polynucleotides encompassed by the invention (including cDNA clones related to the sequences (Clone ID NO: Z), contig sequences (contig identifier (Contig ID:) contig nucleotide sequence identifiers (SEQ ID NO: X)), and genomic sequences (SEQ ID NO: B). The first column provides a unique clone identifier, “Clone ID NO: Z”, for a cDNA clone related to each contig sequence. The second column provides the sequence identifier, “SEQ ID NO: X”, for each contig sequence. The third column provides a unique contig identifier, “Contig ID:” for each contig sequence. The fourth column, provides a BAC identifier “BAC ID NO: A” for the BAC clone referenced in the corresponding row of the table. The fifth column provides the nucleotide sequence identifier, “SEQ ID NO: B” for a fragment of the BAC clone identified in column four of the corresponding row of the table. The sixth column, “Exon From-To”, provides the location (i.e., nucleotide position numbers) within the polynucleotide sequence of SEQ ID NO: B which delineate certain polynucleotides of the invention that are also exemplary members of polynucleotide sequences that encode polypeptides of the invention (e.g., polypeptides containing amino acid sequences encoded by the polynucleotide sequences delineated in column six, and fragments and variants thereof).

[0034] Table 2 summarizes homology and features of some of the polypeptides of the invention. The first column provides a unique clone identifier, “Clone ID NO: Z”, corresponding to a cDNA disclosed in Table 1A. The second column provides the unique contig identifier, “Contig ID:” corresponding to contigs in Table 1A and allowing for correlation with the information in Table 1A. The third column provides the sequence identifier, “SEQ ID NO: X”, for the contig polynucleotide sequences. The fourth column provides the analysis method by which the homology/identity disclosed in the row was determined. Comparisons were made between polypeptides encoded by the polynucleotides of the invention and either a non-redundant protein database (herein referred to as “NR”), or a database of protein families (herein referred to as “PFAM”) as further described below. The fifth column provides a description of PFAM/NR hits having significant matches to a polypeptide of the invention. Column six provides the accession number of the PFAM/NR hit disclosed in the fifth column. Column seven, “Score/Percent Identity”, provides a quality score or the percent identity, of the hit disclosed in column five. Columns 8 and 9, “NT From” and “NT To” respectively, delineate the polynucleotides in “SEQ ID NO: X” that encode a polypeptide having a significant match to the PFAM/NR database as disclosed in the fifth column. In specific embodiments, polypeptides of the invention comprise, or alternatively consist of, an amino acid sequence encoded by the polynucleotides in SEQ ID NO: X as delineated in columns 8 and 9, or fragments or variants thereof.

[0035] Table 3 provides polynucleotide sequences that may be disclaimed according to certain embodiments of the invention. The first column provides a unique clone identifier, “Clone ID NO: Z”, for a cDNA clone related to excretory system associated contig sequences disclosed in Table 1A. The second column provides the sequence identifier, “SEQ ID NO: X”, for contig polynucleotide sequences disclosed in Table 1A. The third column provides the unique contig identifier, “Contig ID”, for contigs disclosed in Table 1A. The fourth column provides a unique integer ‘a’ where ‘a’ is any integer between 1 and the final nucleotide minus 15 of SEQ ID NO: X, represented as “Range of a”, and the fifth column provides a unique integer ‘b’ where ‘b’ is any integer between 15 and the final nucleotide of SEQ ID NO: X, represented as “Range of b”, where both a and b correspond to the positions of nucleotide residues shown in SEQ ID NO: X, and where b is greater than or equal to a +14. For each of the polynucleotides shown as SEQ ID NO: X, the uniquely defined integers can be substituted into the general formula of a−b, and used to describe polynucleotides which may be preferably excluded from the invention. In certain embodiments, preferably excluded from the polynucleotides of the invention (including polynucleotide fragments and variants as described herein and diagnostic and/or therapeutic uses based on these polynucleotides) are at least one, two, three, four, five, ten, or more of the polynucleotide sequence(s) having the accession number(s) disclosed in the sixth column of this Table (including for example, published sequence in connection with a particular BAC clone). In further embodiments, preferably excluded from the invention are the specific polynucleotide sequence(s) contained in the clones corresponding to at least one, two, three, four, five, ten, or more of the available material having the accession numbers identified in the sixth column of this Table (including for example, the actual sequence contained in an identified BAC clone).

[0036] Table 4 provides the key to the tissue/cell source identifier code disclosed in Table 1A, column 7. Column 1 provides a key to the tissue/cell source identifier code disclosed in Table 1A, Column 7. Columns 2-5 provide a description of the tissue or cell source. Codes corresponding to diseased tissues are indicated in column 6 with the word “disease”. The use of the word “disease” in column 6 is non-limiting. The tissue or cell source may be specific (e.g. a neoplasm), or may be disease-associated (e.g., a tissue sample from a normal portion of a diseased organ). Furthermore, tissues and/or cells lacking the “disease” designation may still be derived from sources directly or indirectly involved in a disease state or disorder, and therefore may have a further utility in that disease state or disorder. In numerous cases where the tissue/cell source is a library, column 7 identifies the vector used to generate the library.

[0037] Table 5 provides a key to the OMIM™ reference identification numbers disclosed in Table 1A, column 9. OMIM reference identification numbers (Column 1) were derived from Online Mendelian Inheritance in Man (Online Mendelian Inheritance in Man, OMIM™. McKusick-Nathans Institute for Genetic Medicine, Johns Hopkins University (Baltimore, Md.) and National Center for Biotechnology Information, National Library of Medicine, (Bethesda, Md.) 2000. World Wide Web URL: http://www.ncbi.nlm.nih.gov/omim/). Column 2 provides diseases associated with the cytologic band disclosed in Table 1A, column 8, as determined from the Morbid Map database.

[0038] Table 6 summarizes ATCC Deposits, Deposit dates, and ATCC designation numbers of deposits made with the ATCC in connection with the present application.

[0039] Table 7 shows the cDNA libraries sequenced, tissue source description, vector information and ATCC designation numbers relating to these cDNA libraries.

[0040] Table 8 provides a physical characterization of clones encompassed by the invention. The first column provides the unique clone identifier, “Clone ID NO: Z”, for certain cDNA clones of the invention, as described in Table 1A. The second column provides the size of the cDNA insert contained in the corresponding cDNA clone.

[0041] Definitions

[0042] The following definitions are provided to facilitate understanding of certain terms used throughout this specification.

[0043] In the present invention, “isolated” refers to material removed from its original environment (e.g., the natural environment if it is naturally occurring), and thus is altered “by the hand of man” from its natural state. For example, an isolated polynucleotide could be part of a vector or a composition of matter, or could be contained within a cell, and still be “isolated” because that vector, composition of matter, or particular cell is not the original environment of the polynucleotide. The term “isolated” does not refer to genomic or cDNA libraries, whole cell total or mRNA preparations, genomic DNA preparations (including those separated by electrophoresis and transferred onto blots), sheared whole cell genomic DNA preparations or other compositions where the art demonstrates no distinguishing features of the polynucleotide sequences of the present invention.

[0044] As used herein, a “polynucleotide” refers to a molecule having a nucleic acid sequence encoding SEQ ID NO: Y or a fragment or variant thereof, a nucleic acid sequence contained in SEQ ID NO: X (as described in column 3 of Table 1A) or the complement thereof, a cDNA sequence contained in Clone ID NO: Z (as described in column 1 of Table 1A and contained within a library deposited with the ATCC); a nucleotide sequence encoding the polypeptide encoded by a nucleotide sequence in SEQ ID NO: B as defined in column 6 of Table 1B or a fragment or variant thereof, or a nucleotide coding sequence in SEQ ID NO: B as defined in column 6 of Table 1B or the complement thereof. For example, the polynucleotide can contain the nucleotide sequence of the full length cDNA sequence, including the 5′ and 3′ untranslated sequences, the coding region, as well as fragments, epitopes, domains, and variants of the nucleic acid sequence. Moreover, as used herein, a “polypeptide” refers to a molecule having an amino acid sequence encoded by a polynucleotide of the invention as broadly defined (obviously excluding poly-Phenylalanine or poly-Lysine peptide sequences which result from translation of a polyA tail of a sequence corresponding to a cDNA).

[0045] As used herein, an “excretory system antigen” refers collectively to any polynucleotide disclosed herein (e.g., a nucleic acid sequence contained in SEQ ID NO: X or the complement therof, or cDNA sequence contained in Clone ID NO: Z, or a nucleotide sequence encoding the polypeptide encoded by a nucleotide sequence in SEQ ID NO: B as defined in column 6 of Table 1B, or a nucleotide coding sequence in SEQ ID NO: B as defined in column 6 of Table 1B or the complement thereof and fragments or variants thereof as described herein) or any polypeptide disclosed herein (e.g., an amino acid sequence contained in SEQ ID NO: Y, an amino acid sequence encoded by SEQ ID NO: X, or the complement thereof, an amino acid sequence encoded by the cDNA sequence contained in Clone ID NO: Z, an amino acid sequence encoded by SEQ ID NO: B, or the complement thereof, and fragments or variants thereof as described herein). These excretory system antigens have been determined to be predominantly expressed in excretory system tissues, including normal or diseased tissues (as shown in Table 1A column 7 and Table 4).

[0046] In the present invention, “SEQ ID NO: X” was often generated by overlapping sequences contained in multiple clones (contig analysis). A representative clone containing all or most of the sequence for SEQ ID NO: X is deposited at Human Genome Sciences, Inc. (HGS) in a catalogued and archived library. As shown, for example, in column 1 of Table 1A, each clone is identified by a cDNA Clone ID (identifier generally referred to herein as Clone ID NO: Z). Each Clone ID is unique to an individual clone and the Clone ID is all the information needed to retrieve a given clone from the HGS library. Furthermore, certain clones disclosed in this application have been deposited with the ATCC on Oct. 5, 2000, having the ATCC designation numbers PTA 2574 and PTA 2575; and on Jan. 5, 2001, having the depositor reference numbers TS-1, TS-2, AC-1, and AC-2. In addition to the individual cDNA clone deposits, most of the cDNA libraries from which the clones were derived were deposited at the American Type Culture Collection (hereinafter “ATCC”). Table 7 provides a list of the deposited cDNA libraries. One can use the Clone ID NO: Z to determine the library source by reference to Tables 6 and 7. Table 7 lists the deposited cDNA libraries by name and links each library to an ATCC Deposit. Library names contain four characters, for example, “HTWE.” The name of a cDNA clone (Clone ID NO: Z) isolated from that library begins with the same four characters, for example “HTWEP07”. As mentioned below, Table 1A correlates the Clone ID NO: Z names with SEQ ID NO: X. Thus, starting with an SEQ ID NO: X, one can use Tables 1A, 6 and 7 to determine the corresponding Clone ID NO: Z, which library it came from and which ATCC deposit the library is contained in. Furthermore, it is possible to retrieve a given cDNA clone from the source library by techniques known in the art and described elsewhere herein. The ATCC is located at 10801 University Boulevard, Manassas, Va. 20110-2209, USA. The ATCC deposits were made pursuant to the terms of the Budapest Treaty on the international recognition of the deposit of microorganisms for the purposes of patent procedure.

[0047] In specific embodiments, the polynucleotides of the invention are at least 15, at least 30, at least 50, at least 100, at least 125, at least 500, or at least 1000 continuous nucleotides but are less than or equal to 300 kb, 200 kb, 100 kb, 50 kb, 15 kb, 10 kb, 7.5 kb, 5 kb, 2.5 kb, 2.0 kb, or 1 kb, in length. In a further embodiment, polynucleotides of the invention comprise a portion of the coding sequences, as disclosed herein, but do not comprise all or a portion of any intron. In another embodiment, the polynucleotides comprising coding sequences do not contain coding sequences of a genomic flanking gene (i.e., 5′ or 3′ to the gene of interest in the genome). In other embodiments, the polynucleotides of the invention do not contain the coding sequence of more than 1000, 500, 250, 100, 50, 25, 20, 15, 10, 5, 4, 3, 2, or 1 genomic flanking gene(s).

[0048] A “polynucleotide” of the present invention also includes those polynucleotides capable of hybridizing, under stringent hybridization conditions, to sequences contained in SEQ ID NO: X, or the complement thereof (e.g., the complement of any one, two, three, four, or more of the polynucleotide fragments described herein), the polynucleotide sequence delineated in columns 8 and 9 of Table 2 or the complement thereof, and/or cDNA sequences contained in Clone ID NO: Z (e.g., the complement of any one, two, three, four, or more of the polynucleotide fragments, or the cDNA clone within the pool of cDNA clones deposited with the ATCC, described herein) and/or the polynucleotide sequence delineated in column 6 of Table 1B or the complement thereof “Stringent hybridization conditions” refers to an overnight incubation at 42 degree C. in a solution comprising 50% formamide, 5×SSC (750 mM NaCl, 75 mM trisodium citrate), 50 mM sodium phosphate (pH 7.6), 5× Denhardt's solution, 10% dextran sulfate, and 20 μg/ml denatured, sheared salmon sperm DNA, followed by washing the filters in 0.1×SSC at about 65 degree C.

[0049] Also contemplated are nucleic acid molecules that hybridize to the polynucleotides of the present invention at lower stringency hybridization conditions. Changes in the stringency of hybridization and signal detection are primarily accomplished through the manipulation of formamide concentration (lower percentages of formamide result in lowered stringency), salt conditions, or temperature. For example, lower stringency conditions include an overnight incubation at 37 degree C. in a solution comprising 6×SSPE (20×SSPE=3M NaCl; 0.2M NaH₂PO₄; 0.02M EDTA, pH 7.4), 0.5% SDS, 30% formamide, 100 ug/ml salmon sperm blocking DNA; followed by washes at 50 degree C. with 1×SSPE, 0.1% SDS. In addition, to achieve even lower stringency, washes performed following stringent hybridization can be done at higher salt concentrations (e.g. 5×SSC).

[0050] Note that variations in the above conditions may be accomplished through the inclusion and/or substitution of alternate blocking reagents used to suppress background in hybridization experiments. Typical blocking reagents include Denhardt's reagent, BLOTTO, heparin, denatured salmon sperm DNA, and commercially available proprietary formulations. The inclusion of specific blocking reagents may require modification of the hybridization conditions described above, due to problems with compatibility.

[0051] Of course, a polynucleotide which hybridizes only to polyA+ sequences (such as any 3′ terminal polyA+ tract of a cDNA shown in the sequence listing), or to a complementary stretch of T (or U) residues, would not be included in the definition of “polynucleotide,” since such a polynucleotide would hybridize to any nucleic acid molecule containing a poly (A) stretch or the complement thereof (e.g., practically any double-stranded cDNA clone generated using oligo dT as a primer).

[0052] The polynucleotide of the present invention can be composed of any polyribonucleotide or polydeoxribonucleotide, which may be unmodified RNA or DNA or modified RNA or DNA. For example, polynucleotides can be composed of single- and double-stranded DNA, DNA that is a mixture of single- and double-stranded regions, single- and double-stranded RNA, and RNA that is mixture of single- and double-stranded regions, hybrid molecules comprising DNA and RNA that may be single-stranded or, more typically, double-stranded or a mixture of single- and double-stranded regions. In addition, the polynucleotide can be composed of triple-stranded regions comprising RNA or DNA or both RNA and DNA. A polynucleotide may also contain one or more modified bases or DNA or RNA backbones modified for stability or for other reasons. “Modified” bases include, for example, tritylated bases and unusual bases such as inosine. A variety of modifications can be made to DNA and RNA; thus, “polynucleotide” embraces chemically, enzymatically, or metabolically modified forms.

[0053] The polypeptide of the present invention can be composed of amino acids joined to each other by peptide bonds or modified peptide bonds, i.e., peptide isosteres, and may contain amino acids other than the 20 gene-encoded amino acids. The polypeptides may be modified by either natural processes, such as posttranslational processing, or by chemical modification techniques which are well known in the art. Such modifications are well described in basic texts and in more detailed monographs, as well as in a voluminous research literature. Modifications can occur anywhere in a-polypeptide, including the peptide backbone, the amino acid side-chains and the amino or carboxyl termini. It will be appreciated that the same type of modification may be present in the same or varying degrees at several sites in a given polypeptide. Also, a given polypeptide may contain many types of modifications. Polypeptides may be branched, for example, as a result of ubiquitination, and they may be cyclic, with or without branching. Cyclic, branched, and branched cyclic polypeptides may result from posttranslation natural processes or may be made by synthetic methods. Modifications include acetylation, acylation, ADP-ribosylation, amidation, covalent attachment of flavin, covalent attachment of a heme moiety, covalent attachment of a nucleotide or nucleotide derivative, covalent attachment of a lipid or lipid derivative, covalent attachment of phosphotidylinositol, cross-linking, cyclization, disulfide bond formation, demethylation, formation of covalent cross-links, formation of cysteine, formation of pyroglutamate, formylation, gamma-carboxylation, glycosylation, GPI anchor formation, hydroxylation, iodination, methylation, myristoylation, oxidation, pegylation, proteolytic processing, phosphorylation, prenylation, racemization, selenoylation, sulfation, transfer-RNA mediated addition of amino acids to proteins such as arginylation, and ubiquitination. (See, for instance, PROTEINS—STRUCTURE AND MOLECULAR PROPERTIES, 2nd Ed., T. E. Creighton, W. H. Freeman and Company, New York (1993); POSTTRANSLATIONAL COVALENT MODIFICATION OF PROTEINS, B. C. Johnson, Ed., Academic Press, New York, pgs. 1-12 (1983); Seifter et al., Meth. Enzymol. 182:626-646 (1990); Rattan et al., Ann. N.Y. Acad. Sci. 663:48-62 (1992).)

[0054] “SEQ ID NO: X” refers to a polynucleotide sequence described, for example, in Tables 1A or 2, while “SEQ ID NO: Y” refers to a polypeptide sequence described in column 5 of Table 1A. SEQ ID NO: X is identified by an integer specified in column 3 of Table 1A. The polypeptide sequence SEQ ID NO: Y is a translated open reading frame (ORF) encoded by polynucleotide SEQ ID NO: X. “Clone ID NO: Z” refers to a cDNA clone described in column 1 of Table 1A.

[0055] “A polypeptide having biological activity” refers to a polypeptide exhibiting activity similar to, but not necessarily identical to, an activity of a polypeptide of the present invention, including mature forms, as measured in a particular biological assay, with or without dose dependency. In the case where dose dependency does exist, it need not be identical to that of the polypeptide, but rather substantially similar to the dose-dependence in a given activity as compared to the polypeptide of the present invention (i.e., the candidate polypeptide will exhibit greater activity or not more than about 25-fold less and, preferably, not more than about tenfold less activity, and most preferably, not more than about three-fold less activity relative to the polypeptide of the present invention).

[0056] Table 1A summarizes some of the excretory system associated polynucleotides encompassed by the invention (including contig sequences (SEQ ID NO: X) and clones (Clone ID NO: Z) and further summarizes certain characteristics of these polynucleotides and the polypeptides encoded thereby.

[0057] Polynucleotides and Polypeptides

TABLE 1A

| | | | | AA | | Tissue Distribution | | |
|---|---|---|---|---|---|---|---|---|
| | | | | SEQ | | Library code: count | | OMIM |
| Clone ID | Contig | SEQ | ORF | ID | | (see Table IV for | Cytologic | Disease |
| NO: Z | ID: | ID NO: X | (From-To) | NO: Y | Predicted Epitopes | Library Codes) | Band | Reference(s): |
| H7MBA84 | 625386 | 11 | 111-1 | 331 | Ile-1 to Trp-16. | S0288: 2 | | |
| H7MBC38 | 705707 | 12 | 98-3 | 332 | | S0288: 2 | | |
| H7MBD34 | 928552 | 13 | 72-1 | 333 | | S0288: 2 | | |
| HBAFB96 | 573392 | 14 | 55-219 | 334 | | H0411: 2 | | |
| HBAGJ74 | 945133 | 15 | 8-256 | 335 | Phe-1 to Leu-7, | AR089: 3, AR061: 2 | | |
| | | | | | Gly-16 to Gln-23. | H0411: 2 | | |
| | 947471 | 326 | 264-181 | 646 | | | | |
| HBAGK69 | 881903 | 16 | 59-499 | 336 | Ser-20 to Ser-31, | H0411: 2, L0163: 1 | | |
| | | | | | Asp-36 to Gly-41, | and L0485: 1. | | |
| | | | | | Leu-45 to Arg-56. | | | |
| HBAGU08 | 959191 | 17 | 119-289 | 337 | Gly-29 to Arg-37. | H0411: 2 | | |
| HBAMC12 | 968816 | 18 | 2-325 | 338 | Gln-9 to Ser-14, | H0410: 2 | | |
| | | | | | Ser-85 to Lys-98. | | | |
| HBAMC47 | 854049 | 19 | 367-522 | 339 | | H0410: 3 | | |
| HBAMC68 | 849402 | 20 | 197-298 | 340 | Ser-7 to Glu-16. | H0410: 2 | | |
| HBAMC92 | 572947 | 21 | 225-377 | 341 | Glu-5 to Met-13, | H0410: 2 | | |
| | | | | | Ile-22 to Asn-33. | | | |
| HCKAA13 | 534965 | 22 | 211-360 | 342 | | H0119: 2 | | |
| HCKAA41 | 694397 | 23 | 2-211 | 343 | Thr-18 to Cys-24. | H0431: 1 and H0119: | | |
| | | | | | | 1. | | |
| HFKCJ86 | 504445 | 24 | 154-44 | 344 | | AR051: 20, AR054: | | |
| | | | | | | 16, AR050: 10 | | |
| | | | | | | H0012: 2 | | |
| HFKEA55 | 530256 | 25 | 1-168 | 345 | Gln-17 to Leu-24. | H0012: 2 | | |
| HFKEA65 | 932094 | 26 | 350-481 | 346 | | H0620: 6 and H0012: | | |
| | | | | | | 3. | | |
| HFKEH40 | 523591 | 27 | 1-267 | 347 | Pro-6 to Leu-14. | H0012: 3 | | |
| HFKEJ40 | 909830 | 28 | 53-322 | 348 | Thr-21 to Ala-28, | H0012: 2 | | |
| | | | | | Asp-46 to Glu-56, | | | |
| | | | | | Lys-69 to Thr-76. | | | |
| HFKEJ77 | 529919 | 29 | 95-247 | 349 | | H0012: 1 and H0620: | | |
| | | | | | | 1. | | |
| HFKEM26 | 573949 | 30 | 85-183 | 350 | Asn-7 to Lys-12, | H0012: 2 | | |
| | | | | | Leu-22 to Trp-27. | | | |
| HFKEM70 | 963178 | 31 | 1-327 | 351 | | H0012: 2 and H0620: | | |
| | | | | | | 1. | | |
| HFKEN74 | 974309 | 32 | 2-355 | 352 | Pro-20 to Pro-27, | H0012: 3 and H0620: | | |
| | | | | | Ser-74 to Ser-81. | 1. | | |
| HFKER27 | 926744 | 33 | 196-303 | 353 | His-12 to Gly-17. | H0012: 1 and H0620: | | |
| | | | | | | 1. | | |
| HFKER69 | 918290 | 34 | 234-503 | 354 | Glu-13 to Ala-28. | AR051: 25, AR050: | | |
| | | | | | | 20, AR054: 17 | | |
| | | | | | | H0620: 5 and H0012: | | |
| | | | | | | 2. | | |
| HFKEU09 | 855045 | 35 | 3-302 | 355 | His-1 to Gly-7, | H0012: 2 and H0620: | | |
| | | | | | Ser-28 to Thr-33. | 1. | | |
| HFKEW23 | 854952 | 36 | 98-415 | 356 | Ser-56 to Trp-61. | H0620: 2, H0012: 1 | | |
| | | | | | | and L0775: 1. | | |
| HFKFB18 | 935988 | 37 | 156-365 | 357 | Gly-1 to Pro-7. | H0012: 2 and H0620: | | |
| | | | | | | 2. | | |
| HFKFB23 | 675175 | 38 | 116-424 | 358 | Ser-9 to Lys-18. | H0012: 2 and L0742: | | |
| | | | | | | 1. | | |
| HFKFB42 | 522037 | 39 | 82-318 | 359 | Pro-21 to Thr-29. | H0012: 3 | | |
| HFKFE05 | 932306 | 40 | 92-322 | 360 | Glu-1 to Ser-8. | H0012: 1 and H0620: | | |
| | | | | | | 1. | | |
| HFKFE23 | 881475 | 41 | 165-545 | 361 | Glu-12 to Ala-18, | H0620: 4 and H0012: | | |
| | | | | | Gln-46 to Glu-56. | 3. | | |
| HFKFE59 | 854991 | 42 | 32-328 | 362 | Glu-65 to Glu-72. | H0620: 2 and H0012: | | |
| | | | | | | 1. | | |
| HFKFI14 | 670322 | 43 | 198-398 | 363 | | AR051: 1, AR054: 1 | | |
| | | | | | | H0012: 3, H0620: 3, | | |
| | | | | | | L0662: 1 and L0666: 1. | | |
| | 966320 | 327 | 144-407 | 647 | Lys-26 to Val-37, | | | |
| | | | | | Arg-40 to Val-47. | | | |
| HFKFI22 | 930982 | 44 | 76-330 | 364 | Arg-23 to Arg-28, | H0012: 1 and H0620: | | |
| | | | | | Pro-75 to Lys-81. | 1. | | |
| HFKFI44 | 929786 | 45 | 1-261 | 365 | Ala-3 to Pro-10, | H0012: 2, H0620: 1 | | |
| | | | | | Pro-39 to Pro-45. | and L0595: 1. | | |
| HFKFJ12 | 582587 | 46 | 1-219 | 366 | | H0012: 3 and H0620: | | |
| | | | | | | 3. | | |
| HFKFJ14 | 787260 | 47 | 2-193 | 367 | Ser-13 to Glu-23. | H0012: 2 | | |
| HFKFJ25 | 963144 | 48 | 2-226 | 368 | Lys-1 to Asn-11, | H0620: 3, H0012: 1, | | |
| | | | | | Ser-19 to Val-24. | L0435: 1, L0806: 1 and | | |
| | | | | | | L0438: 1. | | |
| HFKFN66 | 511046 | 49 | 474-253 | 369 | | H0012: 2 and L0748: | | |
| | | | | | | 2. | | |
| HFKFO75 | 573840 | 50 | 3-263 | 370 | | H0012: 2 | | |
| HFKFQ24 | 530222 | 51 | 1-186 | 371 | | H0012: 2 | | |
| HFKGA94 | 855099 | 52 | 68-322 | 372 | Ser-10 to Pro-17, | H0012: 2 | | |
| | | | | | Gly-49 to Gln-57. | | | |
| HFKGC14 | 573785 | 53 | 66-257 | 373 | Lys-18 to Trp-29, | H0620: 6 and H0012: | | |
| | | | | | Arg-48 to Arg-54. | 2. | | |
| HFKGD10 | 968172 | 54 | 270-392 | 374 | Lys-17 to Trp-22. | H0012: 1, H0620: 1 | | |
| | | | | | | and L0366: 1. | | |
| HFKGD48 | 954952 | 55 | 196-396 | 375 | Pro-2 to Asp-11. | H0012: 1 and H0620: | | |
| | | | | | | 1. | | |
| HFKHB46 | 965767 | 56 | 127-420 | 376 | Ser-19 to Lys-34, | H0620: 4 and H0012: | | |
| | | | | | Ala-45 to Leu-53. | 1. | | |
| HFKHB67 | 965847 | 57 | 322-636 | 377 | Leu-34 to Pro-43. | H0620: 4, L0542: 2 | | |
| | | | | | | and L0769: 1. | | |
| HFKHB84 | 854902 | 58 | 34-216 | 378 | | H0620: 2 and H0012: | | |
| | | | | | | 1. | | |
| HFKHD35 | 854887 | 59 | 384-563 | 379 | | H0620: 6, H0012: 1 | | |
| | | | | | | and L0809: 1. | | |
| HFKHD38 | 854861 | 60 | 286-504 | 380 | Leu-3 to Arg-11. | H0620: 2, L0779: 1 | | |
| | | | | | | and L0777: 1. | | |
| HFKHE67 | 881093 | 61 | 1-285 | 381 | Leu-3 to Asn-14, | H0620: 2 | | |
| | | | | | Ser-31 to Ala-44, | | | |
| | | | | | Leu-60 to Glu-65, | | | |
| | | | | | Thr-70 to Gln-76. | | | |
| HFKHF54 | 855118 | 62 | 361-134 | 382 | Asn-11 to Ile-16, | H0620: 3 | | |
| | | | | | Arg-19 to Leu-24. | | | |
| HFKHG06 | 965906 | 63 | 3-353 | 383 | Pro-11 to Pro-16, | H0620: 2 | 12q12-q13 | 107777, |
| | | | | | Glu-61 to Ser-67, | | | 123940, |
| | | | | | Thr-71 to Thr-82, | | | 139350, |
| | | | | | Lys-96 to Ser-105, | | | 139350, |
| | | | | | Thr-107 to Gly-115. | | | 148040, |
| | | | | | | | | 148041, |
| | | | | | | | | 148043, |
| | | | | | | | | 148070, |
| | | | | | | | | 231550, |
| | | | | | | | | 600194, |
| | | | | | | | | 600231, |
| | | | | | | | | 600536, |
| | | | | | | | | 600808, |
| | | | | | | | | 600956, |
| | | | | | | | | 601284, |
| | | | | | | | | 601769, |
| | | | | | | | | 601769, |
| | | | | | | | | 601928, |
| | | | | | | | | 602116, |
| | | | | | | | | 602153 |
| HFKHH68 | 961433 | 64 | 249-545 | 384 | Gln-44 to Trp-49. | H0620: 5, H0012: 2 | | |
| | | | | | | and L0774: 1. | | |
| HFKHR74 | 953800 | 65 | 69-263 | 385 | Leu-23 to Leu-33. | H0620: 2, H0012: 1 | | |
| | | | | | | and L0438: 1. | | |
| HFKHZ39 | 928269 | 66 | 71-346 | 386 | Asp-6 to Arg-13, | H0620: 3 and L0777: | | |
| | | | | | Ser-19 to His-24. | 2. | | |
| HFKID43 | 854988 | 67 | 2-280 | 387 | Pro-44 to Trp-50, | H0620: 4 | | |
| | | | | | Tyr-62 to Leu-82. | | | |
| HFKID48 | 879771 | 68 | 2-310 | 388 | Ala-37 to His-61. | H0620: 2 | | |
| HFKIF01 | 914971 | 69 | 229-378 | 389 | Thr-24 to Thr-30. | H0620: 2 | | |
| HFKIF60 | 914948 | 70 | 1-426 | 390 | Gln-23 to Ser-28, | H0620: 5 and H0012: | | |
| | | | | | Ser-71 to Tyr-79. | 3. | | |
| HFKIH06 | 934051 | 71 | 16-348 | 391 | Gly-8 to Leu-16, | H0620: 3, L0565: 1 | | |
| | | | | | Pro-61 to Ala-70, | and L0745: 1. | | |
| | | | | | Ser-73 to Asn-82, | | | |
| | | | | | Lys-100 to Phe-105. | | | |
| HFKII05 | 930948 | 72 | 11-283 | 392 | Pro-1 to Pro-7, | H0620: 5 | | |
| | | | | | Ala-52 to Glu-61. | | | |
| HFKII11 | 965846 | 73 | 2-130 | 393 | | H0620: 2 | | |
| HFKIP07 | 924825 | 74 | 1-351 | 394 | Gly-14 to Asn-26, | H0620: 2 and H0012: 1. | | |
| | | | | | Gln-31 to Trp-38, | | | |
| | | | | | Ser-43 to Gly-49, | | | |
| | | | | | Ala-60 to Arg-65, | | | |
| | | | | | Arg-73 to Thr-82. | | | |
| HFKIP11 | 965072 | 75 | 1-447 | 395 | Pro-13 to Pro-18, | AR061: 12, AR089: 3 | | |
| | | | | | Arg-66 to Met-71, | L0774: 4, H0620: 3, | | |
| | | | | | Gly-88 to Asp-93, | L0749: 2, L0753: 2 and | | |
| | | | | | Ser-126 to Arg-132. | L0803: 1. | | |
| HFKIR40 | 883093 | 76 | 37-330 | 396 | Asp-1 to Ser-8, | H0620: 2 and L0747: 1. | | |
| | | | | | Asp-83 to Lys-88. | | | |
| HFKIS93 | 854862 | 77 | 3-221 | 397 | Ser-7 to Lys-12. | H0620: 2 | | |
| HFKIV55 | 922739 | 78 | 56-178 | 398 | Gly-15 to Cys-22. | H0620: 2 | | |
| HFKIW31 | 918243 | 79 | 1-426 | 399 | Gly-4 to Ala-10, | AR061: 4, AR089: 3 | 12q13 | 107777, |
| | | | | | His-13 to Arg-23. | H0620: 2 | | 123940, |
| | | | | | | | | 139350, |
| | | | | | | | | 139350, |
| | | | | | | | | 148040, |
| | | | | | | | | 148041, |
| | | | | | | | | 148043, |
| | | | | | | | | 148070, |
| | | | | | | | | 231550, |
| | | | | | | | | 600194, |
| | | | | | | | | 600231, |
| | | | | | | | | 600536, |
| | | | | | | | | 600808, |
| | | | | | | | | 600956, |
| | | | | | | | | 601284, |
| | | | | | | | | 601769, |
| | | | | | | | | 601769, |
| | | | | | | | | 601928, |
| | | | | | | | | 602116, |
| | | | | | | | | 602153 |
| HFKIX76 | 854993 | 80 | 1-171 | 400 | Gly-7 to Gln-12, | H0620: 2 | | |
| | | | | | Arg-33 to Arg-42. | | | |
| HFKJE03 | 959898 | 81 | 3-242 | 401 | Pro-15 to His-21. | H0620: 2 and H0012: 1. | | |
| HFKJK90 | 926511 | 82 | 451-612 | 402 | Pro-13 to Glu-25. | H0620: 5 | | |
| HFKJL17 | 854829 | 83 | 1-243 | 403 | Gly-30 to Gly-35. | H0620: 3 | | |
| HFKJL36 | 930422 | 84 | 136-267 | 404 | Ser-1 to Gln-9, | H0620: 2 | | |
| | | | | | Leu-13 to Glu-26. | | | |
| HFKJP08 | 918312 | 85 | 317-105 | 405 | | H0620: 4 | | |
| HFKJW29 | 932310 | 86 | 113-265 | 406 | Trp-3 to Glu-19, | H0620: 2 and H0012: 1. | | |
| | | | | | Glu-24 to Ala-29. | | | |
| HFKKG09 | 854888 | 87 | 3-209 | 407 | | H0620: 4 | | |
| HFKKM02 | 918260 | 88 | 5-97 | 408 | Pro-15 to His-31. | H0620: 2 | | |
| HFKKM61 | 855082 | 89 | 294-533 | 409 | | H0620: 2 and H0012: | | |
| | | | | | | 1. | | |
| HFKKQ02 | 918270 | 90 | 102-338 | 410 | Pro-17 to Glu-22, | H0620: 2 and H0012: | | |
| | | | | | Val-42 to Gly-47. | 1. | | |
| HFKKR11 | 965858 | 91 | 133-390 | 411 | Glu-1 to Met-7, | H0012: 1 and H0620: | | |
| | | | | | Lys-12 to Arg-20. | 1. | | |
| HFKKS48 | 854927 | 92 | 28-201 | 412 | Asp-41 to Gly-46. | H0620: 3 and H0012: | | |
| | | | | | | 1. | | |
| HFKKU68 | 854913 | 93 | 151-429 | 413 | Thr-1 to Leu-9, | H0620: 2, L0517: 2, | | |
| | | | | | Lys-29 to Gln-35, | L0471: 1 and H0012: 1. | | |
| | | | | | Pro-55 to Ser-71, | | | |
| | | | | | Asn-87 to Gly-93. | | | |
| HFKLD11 | 965830 | 94 | 15-626 | 414 | His-8 to Gly-18, | H0620: 3 | | |
| | | | | | Arg-29 to Ser-36, | | | |
| | | | | | Arg-57 to Asp-66, | | | |
| | | | | | Pro-77 to His-85, | | | |
| | | | | | Leu-87 to Arg-93, | | | |
| | | | | | Val-106 to Ser-114, | | | |
| | | | | | Lys-147 to Ala-153. | | | |
| HFKLD58 | 918235 | 95 | 196-360 | 415 | | H0620: 2 | | |
| HFKLJ15 | 918247 | 96 | 174-1 | 416 | Gly-12 to Arg-21. | H0620: 2 | | |
| HFKLL08 | 958065 | 97 | 127-282 | 417 | | H0620: 5 and L0594: | | |
| | | | | | | 1. | | |
| HFKLR52 | 879749 | 98 | 225-509 | 418 | Gln-10 to Ala-18, | H0620: 2 | 19p13.3 | 108725, |
| | | | | | Pro-20 to Ser-29, | | | 120700, |
| | | | | | Lys-39 to Thr-47, | | | 133171, |
| | | | | | Asp-73 to Gly-78. | | | 136836, |
| | | | | | | | | 145981, |
| | | | | | | | | 147141, |
| | | | | | | | | 164953, |
| | | | | | | | | 188070, |
| | | | | | | | | 600957, |
| | | | | | | | | 601238, |
| | | | | | | | | 601846, |
| | | | | | | | | 602216, |
| | | | | | | | | 602477 |
| HFKLX38 | 880220 | 99 | 3-308 | 419 | | AR089: 1, AR061: 1 | | |
| | | | | | | H0620: 2 | | |
| HFKLY01 | 914907 | 100 | 17-223 | 420 | Gly-20 to Gly-27, | H0012: 2, H0620: 1, | | |
| | | | | | Arg-45 to Arg-59. | L0748: 1 and L0749: 1. | | |
| HFKMI01 | 914876 | 101 | 2-403 | 421 | His-70 to Gly-86, | H0620: 2 | | |
| | | | | | Arg-89 to Pro-95. | | | |
| HKDAE56 | 733549 | 102 | 2-331 | 422 | Thr-1 to Ser-7, | H0356: 2 | | |
| | | | | | Ala-10 to Gly-16. | | | |
| HKDAF34 | 703405 | 103 | 256-453 | 423 | Trp-36 to Asp-41. | H0356: 2 | | |
| HKDAF84 | 781937 | 104 | 53-313 | 424 | | H0356: 2 | | |
| HKDBC65 | 572866 | 105 | 2-46 | 425 | | H0356: 2 | | |
| HKDBI41 | 537508 | 106 | 82-219 | 426 | | H0356: 3 | | |
| HKDBL02 | 920498 | 107 | 1-189 | 427 | | H0356: 2 | | |
| HKIBB08 | 960371 | 108 | 4-183 | 428 | Asn-14 to Pro-23, | S0023: 2 | | |
| | | | | | Leu-33 to Gln-38. | | | |
| HKIBB81 | 525592 | 109 | 213-371 | 429 | Glu-18 to Ser-30. | S0023: 2 | | |
| HKIMC34 | 573424 | 110 | 28-99 | 430 | | H0399: 2 | | |
| HKIXA02 | 920413 | 111 | 2-259 | 431 | Gly-9 to Arg-14, | H0441: 2 | | |
| | | | | | Met-21 to Ala-48, | | | |
| | | | | | Pro-50 to Ser-59. | | | |
| HKIXA37 | 735445 | 112 | 1-273 | 432 | Gly-1 to His-6, | H0441: 2 | | |
| | | | | | Pro-14 to Pro-31, | | | |
| | | | | | Pro-38 to Cys-46. | | | |
| HKIXB03 | 924636 | 113 | 21-371 | 433 | Arg-1 to Val-10. | AR061: 5, AR089: 4 | | |
| | | | | | | H0441: 2 | | |
| HKIXB53 | 727457 | 114 | 147-374 | 434 | | H0441: 2 | | |
| HKIXB79 | 770139 | 115 | 3-350 | 435 | His-1 to Pro-6, | H0441: 2 | | |
| | | | | | Arg-69 to Trp-79, | | | |
| | | | | | Lys-88 to Lys-106. | | | |
| HKIXD42 | 683533 | 116 | 2-115 | 436 | Thr-1 to Asn-7. | H0441: 2 | | |
| HKIXG58 | 464241 | 117 | 3-200 | 437 | Ser-9 to Lys-14. | AR061: 2, AR089: 2 | | |
| | | | | | | H0441: 3, L0794: 2, | | |
| | | | | | | L0805: 2, L0764: 1 and | | |
| | | | | | | L0521: 1. | | |
| HKIXH32 | 920217 | 118 | 227-343 | 438 | | H0441: 3 | | |
| HKIXI82 | 779905 | 119 | 19-444 | 439 | Leu-2 to Leu-17, | H0441: 5 | | |
| | | | | | Asp-19 to Gly-25, | | | |
| | | | | | Leu-44 to Trp-52, | | | |
| | | | | | Pro-77 to Pro-84. | | | |
| HKIXM09 | 920219 | 120 | 13-96 | 440 | Ser-18 to Ser-24. | H0441: 15 | | |
| HKIXM81 | 961026 | 121 | 1-120 | 441 | Gly-1 to Ser-16, | H0441: 3 and L0753: | | |
| | | | | | Lys-24 to Ser-31. | 1. | | |
| HKIXP16 | 881511 | 122 | 60-650 | 442 | | H0441: 2 | | |
| HKIXQ25 | 681855 | 123 | 2-295 | 443 | | H0441: 3, L0758: 3, | | |
| | | | | | | L0666: 2, L0774: 1 and | | |
| | | | | | | L0779: 1. | | |
| HKIXX58 | 666516 | 124 | 1-147 | 444 | | H0441: 2, L0643: 1 | | |
| | | | | | | and L0597: 1. | | |
| HKIXY04 | 736085 | 125 | 1-333 | 445 | Glu-1 to Gly-6, | L0742: 3, H0441: 2 | | |
| | | | | | Gly-13 to Arg-21, | and L0753: 1. | | |
| | | | | | Gly-23 to Gln-31, | | | |
| | | | | | Gln-37 to Asp-43, | | | |
| | | | | | Pro-60 to Gly-67, | | | |
| | | | | | Phe-101 to Lys-107. | | | |
| HKIYF45 | 970756 | 126 | 2-286 | 446 | Thr-59 to Thr-65. | H0441: 2 | | |
| HKIYJ26 | 927503 | 127 | 2-169 | 447 | Gly-13 to Arg-28. | H0441: 4 | | |
| HKIYJ63 | 703320 | 128 | 85-174 | 448 | Arg-15 to Asn-21. | H0441: 2 | | |
| HKIYK78 | 699311 | 129 | 2-88 | 449 | Leu-23 to Thr-29. | H0441: 4 and L0532: | | |
| | | | | | | 1. | | |
| HKIYQ89 | 625636 | 130 | 29-238 | 450 | Cys-7 to Asp-12, | H0441: 2 | | |
| | | | | | Arg-24 to Gln-32. | | | |
| HKMAA07 | 954358 | 131 | 105-230 | 451 | Lys-8 to Ser-19. | S0015: 2 | | |
| HKMAD31 | 825566 | 132 | 78-332 | 452 | Thr-9 to Tyr-15. | S0015: 2 | | |
| HKMAD43 | 842064 | 133 | 2-217 | 453 | Glu-1 to Gly-26. | S0015: 2 | | |
| HKMBA17 | 534523 | 134 | 14-142 | 454 | | S0024: 3 | | |
| HKMBD44 | 715761 | 135 | 31-114 | 455 | | S0024: 2 | | |
| HKMLD48 | 575873 | 136 | 30-293 | 456 | Ala-14 to Ser-21, | H0431: 2 and L0794: | | |
| | | | | | Arg-29 to Leu-37, | 1. | | |
| | | | | | Thr-44 to Gln-53, | | | |
| | | | | | Glu-56 to Leu-62, | | | |
| | | | | | Asn-69 to Cys-75. | | | |
| HKMLJ39 | 705467 | 137 | 193-369 | 457 | | H0431: 2 | | |
| HKMLM38 | 951020 | 138 | 171-347 | 458 | Arg-13 to Ala-23. | H0431: 2 | | |
| HKMLN96 | 881479 | 139 | 139-357 | 459 | | H0431: 2 | | |
| HKMLS46 | 575879 | 140 | 74-241 | 460 | Pro-44 to Gln-49. | H0431: 2 | | |
| HKMMB01 | 851712 | 141 | 4-63 | 461 | | H0431: 3 | | |
| HKMMF21 | 969002 | 142 | 110-859 | 462 | Ser-1 to Asp-7. | H0431: 2 | | |
| HKMMG47 | 720379 | 143 | 2-313 | 463 | Ala-1 to Lys-10, | H0431: 1 and H0012: | | |
| | | | | | Ser-52 to Ser-57, | 1. | | |
| | | | | | Pro-74 to Gly-80, | | | |
| | | | | | Leu-94 to Ser-101. | | | |
| HKMMJ67 | 575750 | 144 | 1-108 | 464 | | H0431: 2 | | |
| HKQAF25 | 529197 | 145 | 126-452 | 465 | Pro-18 to Pro-24. | H0334: 2 | | |
| HRAAC11 | 966861 | 146 | 2-163 | 466 | Lys-24 to Met-54. | H0555: 2 | | |
| HRAAS14 | 658067 | 147 | 81-308 | 467 | Gln-7 to Gly-19. | H0555: 2 | | |
| HRABC50 | 720370 | 148 | 1-159 | 468 | Lys-26 to Ile-31. | H0441: 1 and H0555: | | |
| | | | | | | 1. | | |
| HRABQ95 | 961330 | 149 | 232-438 | 469 | | H0555: 2 | | |
| HRABT03 | 923842 | 150 | 304-489 | 470 | | H0555: 2 | | |
| HRABY74 | 666239 | 151 | 33-374 | 471 | | AR089: 8, AR061: 3 | | |
| | | | | | | H0555: 2 | | |
| HRACE09 | 625425 | 152 | 51-128 | 472 | Gln-18 to Ala-26. | H0555: 2 | | |
| HRACF86 | 867212 | 153 | 20-283 | 473 | Ser-10 to Phe-17. | H0555: 2 | | |
| HRACK33 | 701937 | 154 | 95-247 | 474 | | H0555: 2 | | |
| HRACL64 | 674012 | 155 | 3-284 | 475 | Gly-21 to Glu-33, | H0555: 2 | | |
| | | | | | Lys-83 to Arg-92. | | | |
| HRACM94 | 785191 | 156 | 74-172 | 476 | | H0555: 2 | | |
| HRACW03 | 923428 | 157 | 120-284 | 477 | Ser-1 to Cys-7, | H0555: 2 | | |
| | | | | | Asn-15 to Pro-20, | | | |
| | | | | | Leu-28 to Glu-33. | | | |
| HRACW27 | 682578 | 158 | 38-208 | 478 | Ser-39 to Phe-45. | H0555: 2 | | |
| HRACW36 | 708201 | 159 | 95-298 | 479 | Gly-1 to Arg-10. | H0555: 2 | | |
| HRACW69 | 708769 | 160 | 40-216 | 480 | Ala-3 to Arg-10. | H0555: 3 | | |
| HRACY16 | 659733 | 161 | 185-325 | 481 | Asn-21 to His-34. | H0555: 2 | | |
| HRADF21 | 670398 | 162 | 43-240 | 482 | Pro-45 to Trp-52. | H0620: 1, H0555: 1. | | |
| | | | | | | and L0599: 1. | | |
| HRADJ92 | 756539 | 163 | 268-462 | 483 | Pro-1 to Gln-13. | H0555: 3 | | |
| HRADN24 | 877323 | 164 | 231-476 | 484 | | H0555: 2 | | |
| HRADP10 | 963784 | 165 | 8-253 | 485 | Glu-1 to Arg-9, | H0555: 2 and L0794: | | |
| | | | | | Val-35 to His-47. | 1. | | |
| HRADP39 | 732757 | 166 | 34-210 | 486 | | H0555: 2 | | |
| HRAEC03 | 923401 | 167 | 247-474 | 487 | | H0555: 2 | | |
| HRKAB10 | 968272 | 168 | 127-255 | 488 | | H0361: 3 | | |
| HRKAB42 | 575562 | 169 | 63-275 | 489 | Ala-3 to Ala-15. | H0361: 7 | | |
| HRKAE11 | 967519 | 170 | 205-393 | 490 | | H0361: 3 | | |
| HRKAF31 | 698347 | 171 | 265-372 | 491 | | L0748: 2, H0361: 1, | | |
| | | | | | | L0662: 1 and L0766: 1. | | |
| HRKAE24 | 677443 | 172 | 278-433 | 492 | Ser-13 to Asp-21, | L0599: 2 and H0361: | | |
| | | | | | Asp-27 to Lys-43. | 1. | | |
| HRKAC62 | 742429 | 173 | 3-200 | 493 | | H0361: 1 and L0745: | | |
| | | | | | | 1. | | |
| HRKAB80 | 930473 | 174 | 2-355 | 494 | Pro-9 to Glu-16. | L0005: 1 and H0361: | | |
| | | | | | | 1. | | |
| HRKAA82 | 880783 | 175 | 252-461 | 495 | | H0361: 1, L0518: 1 | | |
| | | | | | | and L0779: 1. | | |
| HRAEF05 | 931998 | 176 | 556-732 | 496 | | H0555: 1, L0748: 1 | | |
| | | | | | | and L0599: 1. | | |
| HRAED30 | 867176 | 177 | 79-411 | 497 | Glu-73 to Pro-94. | L0438: 3 and H0555: | | |
| | | | | | | 1. | | |
| HRAEB43 | 714842 | 178 | 81-236 | 498 | | H0555: 1 and L0748: | | |
| | | | | | | 1. | | |
| HRAEB29 | 690179 | 179 | 129-275 | 499 | | L0745: 2 and H0555: | | |
| | | | | | | 1. | | |
| HRADZ48 | 883281 | 180 | 2-541 | 500 | | AR054: 12, AR050: | | |
| | | | | | | 7, AR061: 2, AR051: | | |
| | | | | | | 2, AR089: 1 | | |
| | | | | | | H0555: 1 | | |
| | 956920 | 328 | 339-127 | 648 | Lys-20 to Gly-26. | | | |
| HRADZ34 | 703680 | 181 | 3-185 | 501 | | H0555: 1 and L0748: | | |
| | | | | | | 1. | | |
| HRADZ26 | 681117 | 182 | 3-461 | 502 | Gln-65 to Tyr-71, | L0731: 4, H0555: 1 | | |
| | | | | | Gly-79 to Tyr-85. | and L0777: 1. | | |
| HRADR43 | 714857 | 183 | 63-167 | 503 | Tyr-8 to Arg-13. | H0555: 1 and L0744: | 9q11-q22 | 229600, |
| | | | | | | 1. | | 264300, |
| | | | | | | | | 600542, |
| | | | | | | | | 602014, |
| | | | | | | | | 602088 |
| HRADR21 | 830039 | 184 | 41-139 | 504 | | L0766: 1 and H0555: | | |
| | | | | | | 1. | | |
| HRADO13 | 656380 | 185 | 1-189 | 505 | | H0555: 1 and L0744: | | |
| | | | | | | 1. | | |
| HRADM45 | 717358 | 186 | 2-472 | 506 | Lys-1 to Leu-6, | AR089: 14, AR061: 6 | | |
| | | | | | Asp-25 to Pro-30. | H0555: 1 and L0777: | | |
| | | | | | | 1. | | |
| HRADK79 | 774597 | 187 | 108-329 | 507 | Arg-16 to Lys-21. | H0555: 1, L0748: 1 | | |
| | | | | | | and L0754: 1. | | |
| HRADE49 | 722595 | 188 | 289-411 | 508 | Asn-1 to Met-8. | H0555: 1 and L0748: | | |
| | | | | | | 1. | | |
| HRADC18 | 665268 | 189 | 306-449 | 509 | | L0439: 5, L0438: 2 | | |
| | | | | | | and H0555: 1. | | |
| HRADA93 | 792001 | 190 | 1-309 | 510 | Pro-14 to Gly-20, | H0555: 1 and L0745: | | |
| | | | | | Asp-34 to Gly-40, | 1. | | |
| | | | | | Arg-44 to Glu-55, | | | |
| | | | | | Gly-71 to Phe-77. | | | |
| HRADA17 | 867198 | 191 | 1-213 | 511 | | L0763: 1, L0764: 1, | | |
| | | | | | | L0766: 1, H0555: 1 and | | |
| | | | | | | L0752: 1. | | |
| HRACX37 | 711466 | 192 | 200-436 | 512 | Leu-6 to Thr-14. | L0748: 2, H0555: 1 | 2p13 | 203800, |
| | | | | | | and L0755: 1. | | 602404 |
| HRACV73 | 764141 | 193 | 48-125 | 513 | Pro-16 to Ser-21. | H0555: 1 and L0597: | | |
| | | | | | | 1. | | |
| HRACV26 | 793997 | 194 | 645-391 | 514 | Ile-29 to Thr-36, | AR054: 10, AR051: | | |
| | | | | | Thr-64 to Cys-71. | 10, AR050: 2 | | |
| | | | | | | H0555: 1 | | |
| HRACT91 | 789974 | 195 | 700-837 | 515 | | L0751: 2, H0555: 1, | | |
| | | | | | | L0439: 1 and L0600: 1. | | |
| HRACR57 | 745443 | 196 | 181-537 | 516 | Ala-13 to Glu-24, | H0555: 1 | | |
| | | | | | Trp-29 to Arg-35. | | | |
| HRACR49 | 722524 | 197 | 96-218 | 517 | | H0555: 1 | | |
| HRACM83 | 780394 | 198 | 165-386 | 518 | Trp-1 to Lys-8. | L0756: 2 and H0555: | | |
| | | | | | | 1. | | |
| HRACH20 | 669556 | 199 | 424-648 | 519 | Ser-3 to Ile-32. | L0439: 3 and H0555: | | |
| | | | | | | 1. | | |
| HRACF04 | 615036 | 200 | 148-297 | 520 | His-43 to Asn-50. | H0555: 1 and L0756: | | |
| | | | | | | 1. | | |
| HRACD65 | 918345 | 201 | 72-386 | 521 | Asp-75 to Glu-94. | H0555: 1 and L0748: | | |
| | | | | | | 1. | | |
| HRACC06 | 867214 | 202 | 225-356 | 522 | Arg-27 to Glu-33. | L0519: 1 and H0555: | | |
| | | | | | | 1. | | |
| HRACA82 | 778964 | 203 | 99-299 | 523 | | H0555: 1 and L0777: | | |
| | | | | | | 1. | | |
| HRACA19 | 668528 | 204 | 366-602 | 524 | | H0555: 1 and L0599: | | |
| | | | | | | 1. | | |
| HRABZ94 | 793278 | 205 | 2-226 | 525 | Glu-3 to Gly-13, | H0555: 1, L0439: 1 | | |
| | | | | | Ser-55 to Gln-61. | and L0749: 1. | | |
| HRABZ67 | 751496 | 206 | 1-183 | 526 | Ser-17 to Gly-24, | L0748: 2, H0555: 1, | | |
| | | | | | Pro-32 to Lys-47. | L0754: 1 and L0756: 1. | | |
| HRABR30 | 691157 | 207 | 242-475 | 527 | Pro-9 to Asn-14. | H0555: 1 and L0599: | | |
| | | | | | | 1. | | |
| HRABO60 | 871380 | 208 | 141-311 | 528 | | L0369: 1 and H0555: | | |
| | | | | | | 1. | | |
| HRABO08 | 959104 | 209 | 172-390 | 529 | Leu-18 to Glu-23. | L0651: 1 and H0555: | | |
| | | | | | | 1. | | |
| HRABM45 | 875735 | 210 | 128-502 | 530 | Gln-1 to Leu-21, | L0600: 3, L0789: 2, | | |
| | | | | | Ser-23 to Gln-36, | H0555: 1, L0754: 1, | | |
| | | | | | Ser-38 to Cys-45, | L0746: 1 and L0596: 1. | | |
| | | | | | Trp-64 to Ser-82, | | | |
| | | | | | Pro-87 to Ser-92, | | | |
| | | | | | Trp-101 to Thr-110. | | | |
| HRABD15 | 867228 | 211 | 3-155 | 531 | | L0803: 2 and H0555: | | |
| | | | | | | 1. | | |
| HRABC08 | 959124 | 212 | 251-433 | 532 | Thr-42 to Ala-54. | L0740: 2, L0598: 1, | | |
| | | | | | | L0373: 1 and H0555: 1. | | |
| HRABA59 | 867239 | 213 | 166-342 | 533 | Ser-44 to Trp-52. | L0761: 1 and H0555: | | |
| | | | | | | 1. | | |
| HRABA25 | 847318 | 214 | 310-182 | 534 | | L0766: 2, L0754: 2, | | |
| | | | | | | L0521: 1, L0768: 1, | | |
| | | | | | | H0555: 1, L0747: 1, | | |
| | | | | | | L0777: 1, L0731: 1 and | | |
| | | | | | | L0591: 1. | | |
| HRAAW62 | 742631 | 215 | 1-207 | 535 | Pro-23 to Ala-28, | H0555: 1 and L0731: | | |
| | | | | | Asn-63 to Arg-69. | 1. | | |
| HRAAO95 | 582177 | 216 | 408-593 | 536 | | H0555: 1 and L0747: | | |
| | | | | | | 1. | | |
| HRAAM31 | 945071 | 217 | 2-355 | 537 | | AR089: 19, AR061: 9 | | |
| | | | | | | H0555: 1 | | |
| HRAAJ29 | 867255 | 218 | 2-553 | 538 | | L0666: 4 and H0555: | | |
| | | | | | | 1. | | |
| HRAAI91 | 790090 | 219 | 331-540 | 539 | | L0748: 2 and H0555: | | |
| | | | | | | 1. | | |
| HRAAH86 | 785398 | 220 | 173-445 | 540 | | L0749: 2 and H0555: | | |
| | | | | | | 1. | | |
| HRAAD24 | 676567 | 221 | 18-491 | 541 | Glu-48 to Val-55, | L0603: 2, H0555: 1, | | |
| | | | | | Glu-78 to Leu-84, | L0751: 1 and L0592: 1. | | |
| | | | | | Thr-96 to Asp-105, | | | |
| | | | | | Pro-137 to Trp-145. | | | |
| HRAAD13 | 657088 | 222 | 166-351 | 542 | Pro-43 to Val-49. | H0555: 1 and L0748: | | |
| | | | | | | 1. | | |
| HKTAB66 | 525582 | 223 | 50-259 | 543 | Phe-21 to Tyr-26. | AR054: 118, AR050: | | |
| | | | | | | 100, AR051: 87 | | |
| | | | | | | H0239: 1 | | |
| HKTAA13 | 971677 | 224 | 226-363 | 544 | | H0239: 1 and L0766: | | |
| | | | | | | 1. | | |
| HKPMB95 | 795060 | 225 | 46-165 | 545 | Asp-24 to Lys-30. | L0756: 2 and H0453: | | |
| | | | | | | 1. | | |
| HKPBA75 | 767550 | 226 | 8-187 | 546 | | S0025: 1 | | |
| HKPBA63 | 525587 | 227 | 3-260 | 547 | Ala-13 to Gly-19. | S0025: 1 | | |
| HKPBA51 | 518897 | 228 | 22-69 | 548 | | S0025: 1 | | |
| HKMSA84 | 783091 | 229 | 1-201 | 549 | | H0461: 1 and L0748: | | |
| | | | | | | 1. | | |
| HKMSA12 | 970839 | 230 | 495-340 | 550 | Tyr-41 to Thr-48. | H0461: 1, L0766: 1 | | |
| | | | | | | and L0777: 1. | | |
| HKMNC21 | 575816 | 231 | 1-195 | 551 | Gly-7 to Lys-18, | H0431: 1 | | |
| | | | | | Thr-46 to His-57. | | | |
| HKMMY63 | 745145 | 232 | 3-173 | 552 | Ser-22 to Gln-35, | H0431: 1 and L0743: | | |
| | | | | | Arg-50 to Val-56. | 1. | | |
| HKMMX31 | 731638 | 233 | 145-294 | 553 | Lys-9 to Cys-18, | H0431: 1, L0747: 1, | | |
| | | | | | Ala-35 to Trp-41, | L0750: 1 and L0605: 1. | | |
| | | | | | Ser-43 to Glu-50. | | | |
| HKMMU45 | 871759 | 234 | 214-447 | 554 | | L0748: 2, H0431: 1, | | |
| | | | | | | L0769: 1, L0750: 1 and | | |
| | | | | | | L0777: 1. | | |
| HKMMR58 | 736099 | 235 | 117-308 | 555 | Leu-13 to Glu-25. | H0431: 1 and L0599: | | |
| | | | | | | 1. | | |
| HKMMJ41 | 920910 | 236 | 130-426 | 556 | Pro-49 to Gly-55, | L0748: 3 and H0431: | | |
| | | | | | Ser-73 to Arg-79. | 1. | | |
| HKMMB27 | 575799 | 237 | 59-304 | 557 | Glu-1 to Ser-18. | H0431: 1 | | |
| HKMMB10 | 964728 | 238 | 221-388 | 558 | | H0431: 1 | | |
| HKMLY45 | 575805 | 239 | 155-304 | 559 | Gln-23 to Pro-32. | H0431: 1 | | |
| HKMLO33 | 859903 | 240 | 218-343 | 560 | Glu-11 to Val-16. | L0527: 3, L0536: 2, | | |
| | | | | | | H0431: 1 and L0662: 1. | | |
| HKMLM54 | 825104 | 241 | 105-404 | 561 | Val-18 to Asp-23, | H0431: 1 and L0731: | | |
| | | | | | Leu-47 to Ser-53, | 1. | | |
| | | | | | Pro-58 to Ser-66. | | | |
| HKMLK76 | 840137 | 242 | 265-480 | 562 | Pro-6 to Ala-16. | H0431: 1 and L0748: | | |
| | | | | | | 1. | | |
| HKMLF28 | 705533 | 243 | 223-354 | 563 | Lys-10 to Lys-21, | H0431: 1 and L0740: | | |
| | | | | | Pro-33 to Trp-44. | 1. | | |
| HKMLD21 | 671010 | 244 | 190-261 | 564 | | H0431: 1 and L0756: | | |
| | | | | | | 1. | | |
| HKMLC74 | 765669 | 245 | 77-211 | 565 | | H0431: 1 and L0594: | | |
| | | | | | | 1. | | |
| HKMLC56 | 733473 | 246 | 29-181 | 566 | Gln-20 to Leu-25. | H0431: 1 and L0756: | | |
| | | | | | | 1. | | |
| HKMBD80 | 522402 | 247 | 2-58 | 567 | Val-14 to Tyr-19. | S0024: 1 | | |
| HKMBD57 | 522406 | 248 | 174-347 | 568 | | S0024: 1 | | |
| HKMBC21 | 670144 | 249 | 102-293 | 569 | Glu-14 to Ala-19. | S0024: 1 and L0749: | | |
| | | | | | | 1. | | |
| HKMBA94 | 793011 | 250 | 1-111 | 570 | Cys-29 to Ile-34. | S0024: 1 and L0744: | | |
| | | | | | | 1. | | |
| HKIYT69 | 843327 | 251 | 27-284 | 571 | Gly-15 to Ala-28, | H0441: 1 | 3p | |
| | | | | | Phe-32 to Ala-38, | | | |
| | | | | | His-47 to Thr-61, | | | |
| | | | | | Lys-66 to Ala-85. | | | |
| HKIYS82 | 779904 | 252 | 273-452 | 572 | Met-17 to Asn-22. | L0755: 2 and H0441: | | |
| | | | | | | 1. | | |
| HKIYN76 | 770080 | 253 | 95-172 | 573 | Asn-11 to Gly-23. | H0441: 1 and L0777: | | |
| | | | | | | 1. | | |
| HKIYM14 | 658464 | 254 | 184-456 | 574 | Gly-64 to Thr-70, | H0441: 1, L0770: 1 | | |
| | | | | | Ile-85 to Lys-91. | and L0439: 1. | | |
| HKIYL69 | 757602 | 255 | 1-273 | 575 | | L0439: 2 and H0441: | | |
| | | | | | | 1. | | |
| HKIYF03 | 924241 | 256 | 346-534 | 576 | | L0439: 5, L0438: 3, | | |
| | | | | | | L0749: 2, L0717: 1, | | |
| | | | | | | H0441: 1 and L0520: 1. | | |
| HKIYC59 | 868263 | 257 | 36-209 | 577 | Cys-20 to Thr-25, | L0439: 3, H0441: 1, | | |
| | | | | | Tyr-41 to Arg-46. | L0438: 1 and L0747: 1. | | |
| HKIYC29 | 725699 | 258 | 95-463 | 578 | Ser-5 to Trp-12, | H0441: 1 and L0747: | | |
| | | | | | Thr-42 to Ser-50, | 1. | | |
| | | | | | Val-57 to Asp-67, | | | |
| | | | | | Pro-97 to Gln-112. | | | |
| HKIXT41 | 881507 | 259 | 111-293 | 579 | Pro-50 to His-56. | H0441: 1 and L0439: | | |
| | | | | | | 1. | | |
| HKIXQ80 | 775405 | 260 | 2-232 | 580 | Thr-12 to Leu-18, | H0441: 1 | | |
| | | | | | Thr-35 to Trp-40. | | | |
| HKIXQ47 | 720373 | 261 | 51-278 | 581 | Ser-52 to Cys-59. | L0777: 2, H0441: 1, | | |
| | | | | | | L0794: 1, L0803: 1, | | |
| | | | | | | L0776: 1 and L0529: 1. | | |
| HKIXB15 | 660458 | 262 | 74-148 | 582 | Val-14 to Lys-25. | H0441: 1 and L0598: | | |
| | | | | | | 1. | | |
| HKISB59 | 739423 | 263 | 163-399 | 583 | Phe-8 to Arg-15, | L0439: 4, H0408: 1 | | |
| | | | | | Lys-27 to Ala-37, | and L0594: 1. | | |
| | | | | | Arg-50 to Gly-63. | | | |
| HKISA86 | 785613 | 264 | 186-398 | 584 | Lys-5 to Gly-12. | L0439: 2 and H0408: | | |
| | | | | | | 1. | | |
| HKIMG64 | 857190 | 265 | 136-294 | 585 | Gly-24 to Ser-32. | H0399: 1 and L0532: | | |
| | | | | | | 1. | | |
| HKIMG03 | 924745 | 266 | 250-552 | 586 | Thr-1 to Ala-6, | H0399: 1 and L0759: | | |
| | | | | | His-14 to Phe-26, | 1. | | |
| | | | | | Gln-33 to Ser-40. | | | |
| HKIBB62 | 742526 | 267 | 3-146 | 587 | Gly-33 to Arg-43. | L0754: 2 and S0023: | | |
| | | | | | | 1. | | |
| HKDBF75 | 881308 | 268 | 14-367 | 588 | | L0803: 7, L0774: 4 | | |
| | | | | | | and H0356: 1. | | |
| HFKLK34 | 907556 | 269 | 3-269 | 589 | Gly-30 to Pro-35, | H0620: 1 and L0749: | | |
| | | | | | Leu-50 to Gly-60. | 1. | | |
| HFKLC10 | 963164 | 270 | 156-425 | 590 | Gly-1 to Pro-14, | H0620: 1, L0794: 1 | | |
| | | | | | Pro-28 to Asp-40, | and L0803: 1. | | |
| | | | | | Arg-46 to Glu-53, | | | |
| | | | | | His-57 to Cys-72. | | | |
| HFKJP91 | 836476 | 271 | 1-537 | 591 | His-11 to Trp-18. | H0620: 1, L0475: 1 | | |
| | | | | | | and L0594: 1. | | |
| HFKGB24 | 677402 | 272 | 2-214 | 592 | Val-29 to Cys-37, | H0012: 1 and L0731: | | |
| | | | | | Ser-42 to Arg-47. | 1. | | |
| HFKFI85 | 589991 | 273 | 280-513 | 593 | Ile-2 to Trp-7, | H0012: 1 | | |
| | | | | | Thr-14 to Asp-41. | | | |
| | 855078 | 329 | 199-447 | 649 | | | | |
| HFKFI46 | 586801 | 274 | 2-418 | 594 | Ala-9 to Trp-25, | H0012: 1 | | |
| | | | | | Gly-32 to Arg-40, | | | |
| | | | | | Ala-43 to Thr-52, | | | |
| | | | | | Pro-57 to Pro-62, | | | |
| | | | | | Ala-64 to Gly-70, | | | |
| | | | | | Pro-72 to Arg-89, | | | |
| | | | | | Glu-96 to Glu-103. | | | |
| HFKEM62 | 917769 | 275 | 3-302 | 595 | Thr-13 to Gly-24, | H0012: 1 and L0759: | | |
| | | | | | Ala-35 to Asp-58, | 1. | | |
| | | | | | Tyr-66 to Lys-77, | | | |
| | | | | | Thr-81 to Ile-91. | | | |
| HFKDH49 | 826803 | 276 | 184-2 | 596 | Thr-5 to Arg-10, | H0012: 1 | | |
| | | | | | Lys-36 to Pro-46. | | | |
| | 912742 | 330 | 547-296 | 650 | | | | |
| HFKDF03 | 960977 | 277 | 234-437 | 597 | Pro-12 to Lys-18, | H0012: 1 and L0783: | | |
| | | | | | Arg-25 to Lys-31, | 1. | | |
| | | | | | Met-37 to Glu-45. | | | |
| HFKDE75 | 766436 | 278 | 356-183 | 598 | | L0599: 2 and H0012: | | |
| | | | | | | 1. | | |
| HFKCO51 | 725968 | 279 | 432-64 | 599 | Met-9 to His-16. | H0012: 1 and L0591: | | |
| | | | | | | 1. | | |
| HFKCO02 | 917279 | 280 | 433-203 | 600 | | H0012: 1 | | |
| HFKCJ69 | 753680 | 281 | 147-1 | 601 | | H0012: 1 and L0740: | | |
| | | | | | | 1. | | |
| HFKCJ52 | 725974 | 282 | 303-1 | 602 | Asn-1 to Trp-9, | H0012: 1, L0748: 1 | | |
| | | | | | Gln-62 to Glu-67, | and L0754: 1. | | |
| | | | | | Ala-71 to Asp-80, | | | |
| | | | | | Ser-86 to Arg-94. | | | |
| HFKCG41 | 712718 | 283 | 480-349 | 603 | | H0012: 1 and L0751: | | |
| | | | | | | 1. | | |
| HFKCC73 | 742991 | 284 | 164-331 | 604 | Leu-2 to Lys-12, | L0439: 2 and H0012: | | |
| | | | | | Pro-21 to Arg-34, | 1. | | |
| | | | | | Pro-38 to Val-45, | | | |
| | | | | | Ser-47 to Lys-56. | | | |
| HFKBC11 | 967999 | 285 | 827-666 | 605 | | H0011: 1 and L0750: | | |
| | | | | | | 1. | | |
| HFKBC08 | 960526 | 286 | 612-382 | 606 | | L0774: 3 and H0011: | | |
| | | | | | | 1. | | |
| HCKAA51 | 534949 | 287 | 2-85 | 607 | | H0119: 1 | | |
| HBAMD83 | 573369 | 288 | 1-156 | 608 | Pro-1 to Leu-19. | H0410: 1 | | |
| HBAMD81 | 778176 | 289 | 112-369 | 609 | Arg-67 to Ser-86. | H0410: 1 | | |
| HBAMD79 | 573373 | 290 | 2-94 | 610 | | H0410: 1 | | |
| HBAMD74 | 573372 | 291 | 120-368 | 611 | | H0410: 1 | | |
| HBAMD69 | 573371 | 292 | 95-352 | 612 | Tyr-17 to Ser-22, | H0410: 1 | | |
| | | | | | Ser-46 to Glu-52. | | | |
| HBAMD66 | 750532 | 293 | 180-374 | 613 | Tyr-28 to Gly-36, | H0410: 1 | | |
| | | | | | Thr-51 to Leu-57. | | | |
| HBAMD57 | 573370 | 294 | 2-178 | 614 | Asn-48 to Phe-54. | H0410: 1 | | |
| HBAMD50 | 864379 | 295 | 130-318 | 615 | Glu-55 to Lys-61. | H0410: 1 | | |
| HBAMD41 | 573374 | 296 | 243-368 | 616 | | H0410: 1 | | |
| HBAMD36 | 573367 | 297 | 223-318 | 617 | His-2 to Thr-10. | H0410: 1 | | |
| HBAMD35 | 571354 | 298 | 205-333 | 618 | Glu-1 to Pro-14, | H0410: 1 | | |
| | | | | | Phe-32 to Leu-37. | | | |
| HBAMD33 | 573365 | 299 | 50-166 | 619 | Pro-22 to Arg-30. | H0410: 1 | | |
| HBAMD32 | 573362 | 300 | 17-175 | 620 | Gly-1 to Asp-13, | H0410: 1 | | |
| | | | | | Ser-15 to Lys-23. | | | |
| HBAMD31 | 698280 | 301 | 155-256 | 621 | Trp-10 to Ser-21. | H0410: 1 | | |
| HBAMD14 | 573378 | 302 | 48-170 | 622 | Lys-12 to Arg-21, | H0410: 1 | | |
| | | | | | Asp-29 to Asn-35. | | | |
| HBAMC66 | 575218 | 303 | 1-243 | 623 | Cys-26 to Gly-35, | H0410: 1 | | |
| | | | | | Tyr-45 to Val-54, | | | |
| | | | | | Tyr-56 to Asn-63. | | | |
| HBAMC65 | 750405 | 304 | 74-328 | 624 | | H0410: 1 | | |
| HBAMC63 | 572936 | 305 | 199-324 | 625 | His-7 to Tyr-18. | H0410: 1 | | |
| HBAMC62 | 572927 | 306 | 51-242 | 626 | | H0410: 1 | | |
| HBAMC52 | 572935 | 307 | 29-211 | 627 | | H0410: 1 | | |
| HBAMC51 | 572929 | 308 | 1-144 | 628 | Trp-9 to Gly-16. | H0410: 1 | | |
| HBAMC42 | 572938 | 309 | 2-79 | 629 | | H0410: 1 | | |
| HBAMC35 | 571360 | 310 | 166-360 | 630 | | H0410: 1 | | |
| HBAMC34 | 572926 | 311 | 175-297 | 631 | | H0410: 1 | | |
| HBAMC23 | 572946 | 312 | 146-241 | 632 | Phe-19 to Tyr-32. | H0410: 1 | | |
| HBAMC05 | 932234 | 313 | 57-203 | 633 | Pro-10 to Pro-15. | H0410: 1 | | |
| HBAGW31 | 960146 | 314 | 373-702 | 634 | Lys-2 to Asn-12, | L0601: 5, L0748: 3, | | |
| | | | | | Asp-43 to Arg-51, | H0411: 1 and L0755: 1. | | |
| | | | | | Pro-82 to Ser-98. | | | |
| HBAGR76 | 864389 | 315 | 115-321 | 635 | Arg-7 to Val-16, | H0411: 1 and L0749: | | |
| | | | | | Pro-36 to Asn-46. | 1. | | |
| HBAGH38 | 487933 | 316 | 122-238 | 636 | | H0411: 1 and L0439: | 15q15 | 177070, |
| | | | | | | 1. | | 177070, |
| | | | | | | | | 182500, |
| | | | | | | | | 218000, |
| | | | | | | | | 227220, |
| | | | | | | | | 243500, |
| | | | | | | | | 600839, |
| | | | | | | | | 601800 |
| HBAFV71 | 932783 | 317 | 2-436 | 637 | Ser-8 to Glu-13, | H0411: 1 and L0758: | | |
| | | | | | Arg-28 to Leu-34, | 1. | | |
| | | | | | Phe-75 to Ser-80. | | | |
| HBAFU01 | 916248 | 318 | 294-473 | 638 | | H0411: 1 and L0759: | | |
| | | | | | | 1. | | |
| HBAFP29 | 690521 | 319 | 161-337 | 639 | | H0411: 1 and L0746: | | |
| | | | | | | 1. | | |
| HBAFI04 | 615078 | 320 | 178-41 | 640 | | H0411: 1 and L0743: | | |
| | | | | | | 1. | | |
| HBAFF55 | 753801 | 321 | 96-467 | 641 | Pro-2 to Leu-11, | H0411: 1 and L0747: | | |
| | | | | | Ala-13 to His-32, | 1. | | |
| | | | | | Cys-55 to Asn-69. | | | |
| HBAFF09 | 926667 | 322 | 1-642 | 642 | Phe-45 to Tyr-50, | AR054: 11, AR051: | | |
| | | | | | Gln-56 to Asp-63, | 2, AR050: 1 | | |
| | | | | | Gln-87 to Gly-93, | H0411: 1 | | |
| | | | | | Cys-106 to Arg-116, | | | |
| | | | | | Arg-128 to Ile-133, | | | |
| | | | | | Pro-151 to Lys-158, | | | |
| | | | | | Glu-179 to Gly-188. | | | |
| HBAFC04 | 615472 | 323 | 12-266 | 643 | Thr-5 to Trp-29, | H0411: 1 and L0777: | | |
| | | | | | Ser-49 to Gln-62, | 1. | | |
| | | | | | Gly-75 to Pro-80. | | | |
| HAKAD91 | 509854 | 324 | 186-320 | 644 | Pro-20 to Tyr-25. | H0053: 1 | | |
| HAKAD72 | 509855 | 325 | 380-240 | 645 | Pro-6 to Phe-25, | H0053: 1 | | |
| | | | | | Gln-36 to Ser-47. | | | |

[0058] The first column in Table 1A provides a unique “Clone ID NO: Z” for a cDNA clone related to each contig sequence disclosed in Table 1A. This clone ID references the cDNA clone which contains at least the 5′ most sequence of the assembled contig, and at least a portion of SEQ ID NO: X was determined by directly sequencing the referenced clone. The reference clone may have more sequence than described in the sequence listing or the clone may have less. In the vast majority of cases, however, the clone is believed to encode a full-length polypeptide. In the case where a clone is not full-length, a full-length cDNA can be obtained by methods known in the art and/or as described elsewhere herein.

[0059] The second column in Table 1A provides a unique “Contig ID” identification for each contig sequence. The third column provides the “SEQ ID NO: X” identifier for each of the excretory system associated contig polynucleotide sequences disclosed in Table 1A. The fourth column, “ORF (From-To)”, provides the location (i.e., nucleotide position numbers) within the polynucleotide sequence “SEQ ID NO: X” that delineate the preferred open reading frame (ORF) shown in the sequence listing and referenced in Table 1A, column 5, as SEQ ID NO: Y. Where the nucleotide position number “To” is lower than the nucleotide position number “From”, the preferred ORF is the reverse complement of the referenced polynucleotide sequence.

[0060] The fifth column in Table 1A provides the corresponding SEQ ID NO: Y for the polypeptide sequence encoded by the preferred ORF delineated in column 4. In one embodiment, the invention provides an amino acid sequence comprising, or alternatively consisting of, a polypeptide encoded by the portion of SEQ ID NO: X delineated by “ORF (From-To)”. Also provided are polynucleotides encoding such amino acid sequences and the complementary strand thereto.

[0061] Column 6 in Table 1A lists residues comprising epitopes contained in the polypeptides encoded by the preferred ORF (SEQ ID NO: Y), as predicted using the algorithm of Jameson and Wolf, (1988) Comp. Appl. Biosci. 4:181-186. The Jameson-Wolf antigenic analysis was performed using the computer program PROTEAN (Version 3.11 for the Power MacIntosh, DNASTAR, Inc., 1228 South Park Street Madison, Wis.). In specific embodiments, polypeptides of the invention comprise, or alternatively consist of, at least one, two, three, four, five or more of the predicted epitopes as described in Table 1A. It will be appreciated that depending on the analytical criteria used to predict antigenic determinants, the exact address of the determinant may vary slightly.

[0062] Column 7 in Table 1A provides an expression profile and library code: count for each of the contig sequences (SEQ ID NO: X) disclosed in Table 1A, which can routinely be combined with the information provided in Table 4 and used to determine the normal or diseased tissues, cells, and/or cell line libraries which predominantly express the polynucleotides of the invention. The first number in column 7 (preceding the colon), represents the tissue/cell source identifier code corresponding to the code and description provided in Table 4. For those identifier codes in which the first two letters are not “AR”, the second number in column 7 (following the colon) represents the number of times a sequence corresponding to the reference polynucleotide sequence was identified in the tissue/cell source. Those tissue/cell source identifier codes in which the first two letters are “AR” designate information generated using DNA array technology. Utilizing this technology, cDNAs were amplified by PCR and then transferred, in duplicate, onto the array. Gene expression was assayed through hybridization of first strand cDNA probes to the DNA array. cDNA probes were generated from total RNA extracted from a variety of different tissues and cell lines. Probe synthesis was performed in the presence of ³³P dCTP, using oligo(dT) to prime reverse transcription. After hybridization, high stringency washing conditions were employed to remove non-specific hybrids from the array. The remaining signal, emanating from each gene target, was measured using a Phosphorimager. Gene expression was reported as Phosphor Stimulating Luminescence (PSL) which reflects the level of phosphor signal generated from the probe hybridized to each of the gene targets represented on the array. A local background signal subtraction was performed before the total signal generated from each array was used to normalize gene expression between the different hybridizations. The value presented after “[array code]:” represents the mean of the duplicate values, following background subtraction and probe normalization. One of skill in the art could routinely use this information to identify normal and/or diseased tissue(s) which show a predominant expression pattern of the corresponding polynucleotide of the invention or to identify polynucleotides which show predominant and/or specific tissue and/or cell expression. The sequences disclosed herein have been determined to be predominantly expressed in excretory system tissues, including normal and diseased excretory system tissues (See Table 1A, column 7 and Table 4).

[0063] Column 8 in Table 1A provides a chromosomal map location for certain polynucleotides of the invention. Chromosomal location was determined by finding exact matches to EST and cDNA sequences contained in the NCBI (National Center for Biotechnology Information) UniGene database. Each sequence in the UniGene database is assigned to a “cluster”; all of the ESTs, cDNAs, and STSs in a cluster are believed to be derived from a single gene. Chromosomal mapping data is often available for one or more sequence(s) in a UniGene cluster; this data (if consistent) is then applied to the cluster as a whole. Thus, it is possible to infer the chromosomal location of a new polynucleotide sequence by determining its identity with a mapped UniGene cluster.

[0064] A modified version of the computer program BLASTN (Altshul et al., J. Mol. Biol. 215:403-410 (1990), and Gish et al., Nat. Genet. 3:266-272 (1993)) was used to search the UniGene database for EST or cDNA sequences that contain exact or near-exact matches to a polynucleotide sequence of the invention (the ‘Query’). A sequence from the UniGene database (the ‘Subject’) was said to be an exact match if it contained a segment of 50 nucleotides in length such that 48 of those nucleotides were in the same order as found in the Query sequence. If all of the matches that met this criteria were in the same UniGene cluster, and mapping data was available for this cluster, it is indicated in Table 1A under the heading “Cytologic Band”. Where a cluster had been further localized to a distinct cytologic band, that band is disclosed; where no banding information was available, but the gene had been localized to a single chromosome, the chromosome is disclosed.

[0065] Once a presumptive chromosomal location was determined for a polynucleotide of the invention, an associated disease locus was identified by comparison with a database of diseases, which have been experimentally associated with genetic loci. The database used was the Morbid Map, derived from OMIM™ (supra). If the putative chromosomal location of a polynucleotide of the invention (Query sequence) was associated with a disease in the Morbid Map database, an OMIM reference identification number was noted in column 9, Table 1A, labeled “OMIM Disease Reference(s)”. Table 5 is a key to the OMIM reference identification numbers (column 1), and provides a description of the associated disease in Column 2.

TABLE 1B

| | SEQ | | | | |
|---|---|---|---|---|---|
| Clone ID | ID | CONTIG | BAC ID: | SEQ ID | EXON |
| NO: Z | NO: X | ID: | A | NO: B | From-To |
| H7MBC38 | 12 | 705707 | AL035088 | 651 | 1-86 |
| H7MBC38 | 12 | 705707 | AL035088 | 652 | 1-189 |
| HBAGK69 | 16 | 881903 | AL160251 | 653 | 1-830 |
| HBAGK69 | 16 | 881903 | AC007721 | 654 | 1-805 |
| | | | | | 1510-1798 |
| | | | | | 4114-4607 |
| HBAGK69 | 16 | 881903 | AC007721 | 655 | 1-100 |
| HBAGK69 | 16 | 881903 | AC007721 | 656 | 1-1263 |
| HBAMC12 | 18 | 968816 | AC009554 | 657 | 1-375 |
| HBAMC12 | 18 | 968816 | AC009554 | 658 | 1-469 |
| HBAMC47 | 19 | 854049 | AL139799 | 659 | 1-507 |
| HBAMC92 | 21 | 572947 | AC023353 | 660 | 1-440 |
| HBAMC92 | 21 | 572947 | AC064832 | 661 | 1-447 |
| HCKAA13 | 22 | 534965 | AC040919 | 662 | 1-652 |
| HCKAA13 | 22 | 534965 | AP001845 | 663 | 1-652 |
| HCKAA13 | 22 | 534965 | AP001374 | 664 | 1-652 |
| HCKAA13 | 22 | 534965 | AC040919 | 665 | 1-191 |
| | | | | | 201-308 |
| | | | | | 454-1086 |
| | | | | | 3154-3282 |
| | | | | | 3440-3857 |
| | | | | | 4633-4941 |
| HCKAA13 | 22 | 534965 | AP001845 | 666 | 1-271 |
| HCKAA13 | 22 | 534965 | AP001374 | 667 | 1-308 |
| HCKAA41 | 23 | 694397 | AC018663 | 668 | 1-402 |
| HCKAA41 | 23 | 694397 | AC018663 | 669 | 1-248 |
| HCKAA41 | 23 | 694397 | AC018663 | 670 | 1-1609 |
| HFKEA55 | 25 | 530256 | AP000859 | 671 | 1-108 |
| | | | | | 205-628 |
| | | | | | 1117-1259 |
| | | | | | 1538-1745 |
| | | | | | 2172-2690 |
| | | | | | 2786-3154 |
| | | | | | 3246-3403 |
| | | | | | 4031-4131 |
| | | | | | 4234-6030 |
| | | | | | 6184-7366 |
| HFKEA55 | 25 | 530256 | AC018780 | 672 | 1-108 |
| | | | | | 205-627 |
| | | | | | 1088-1230 |
| | | | | | 1509-1716 |
| | | | | | 2143-2661 |
| | | | | | 2757-3125 |
| | | | | | 3217-3374 |
| | | | | | 4002-4102 |
| | | | | | 4205-6001 |
| | | | | | 6155-7337 |
| HFKEA55 | 25 | 530256 | AP001785 | 673 | 1-99 |
| | | | | | 368-765 |
| | | | | | 963-1141 |
| | | | | | 1966-2078 |
| | | | | | 2175-2597 |
| | | | | | 3058-3200 |
| | | | | | 3479-3686 |
| | | | | | 4113-4631 |
| | | | | | 4727-5095 |
| | | | | | 5187-5344 |
| | | | | | 5973-6073 |
| | | | | | 6176-7972 |
| | | | | | 8126-9308 |
| HFKEA55 | 25 | 530256 | AP000859 | 674 | 1-428 |
| HFKEA55 | 25 | 530256 | AC018780 | 675 | 1-428 |
| HFKEA55 | 25 | 530256 | AP001785 | 676 | 1-224 |
| HFKEA55 | 25 | 530256 | AP001785 | 677 | 1-428 |
| HFKEA65 | 26 | 932094 | AC027598 | 678 | 1-638 |
| HFKEA65 | 26 | 932094 | AC002366 | 679 | 1-649 |
| HFKEA65 | 26 | 932094 | AC002366 | 680 | 1-1471 |
| | | | | | 2332-2618 |
| | | | | | 2700-3922 |
| HFKEH40 | 27 | 523591 | AC021138 | 681 | 1-426 |
| HFKEH40 | 27 | 523591 | AC008737 | 682 | 1-431 |
| HFKEH40 | 27 | 523591 | AC021138 | 683 | 1-162 |
| | | | | | 420-504 |
| | | | | | 1469-1565 |
| | | | | | 2108-2321 |
| | | | | | 2421-4280 |
| HFKEH40 | 27 | 523591 | AC008737 | 684 | 1-556 |
| | | | | | 568-1178 |
| HFKEH40 | 27 | 523591 | AC008737 | 685 | 1-32 |
| | | | | | 757-942 |
| | | | | | 3844-4463 |
| | | | | | 5615-5787 |
| | | | | | 5904-6600 |
| | | | | | 6947-7075 |
| | | | | | 7265-7475 |
| | | | | | 7586-8105 |
| | | | | | 8828-8996 |
| | | | | | 10237-10411 |
| | | | | | 10669-10753 |
| | | | | | 11720-11816 |
| | | | | | 12360-12573 |
| | | | | | 12673-14535 |
| HFKEJ77 | 29 | 529919 | AC073640 | 686 | 1-238 |
| HFKEJ77 | 29 | 529919 | AC020928 | 687 | 1-667 |
| HFKEJ77 | 29 | 529919 | AC073266 | 688 | 1-667 |
| HFKEJ77 | 29 | 529919 | AC073640 | 689 | 1-654 |
| HFKEJ77 | 29 | 529919 | AC020928 | 690 | 1-650 |
| HFKEJ77 | 29 | 529919 | AC073266 | 691 | 1-676 |
| HFKEJ77 | 29 | 529919 | AC073266 | 692 | 1-650 |
| HFKEM26 | 30 | 573949 | AC004982 | 693 | 1-420 |
| | | | | | 1344-1738 |
| | | | | | 2682-2852 |
| | | | | | 5545-5607 |
| | | | | | 5615-5894 |
| | | | | | 6449-6611 |
| | | | | | 8468-8843 |
| | | | | | 12028-12179 |
| | | | | | 12613-13049 |
| | | | | | 13304-13617 |
| | | | | | 13895-14373 |
| | | | | | 14981-15243 |
| | | | | | 16721-17118 |
| | | | | | 17305-21277 |
| | | | | | 22988-23119 |
| | | | | | 23726-26190 |
| HFKEM26 | 30 | 573949 | AC004982 | 694 | 1-101 |
| HFKEM70 | 31 | 963178 | AL136528 | 695 | 1-892 |
| | | | | | 1133-2737 |
| | | | | | 3760-4178 |
| | | | | | 4229-4310 |
| | | | | | 4391-4668 |
| | | | | | 5176-5753 |
| | | | | | 6229-6333 |
| | | | | | 7984-8053 |
| HFKEN74 | 32 | 974309 | AC008878 | 696 | 1-927 |
| HFKEN74 | 32 | 974309 | AC008878 | 697 | 1-471 |
| HFKER27 | 33 | 926744 | AL157386 | 698 | 1-416 |
| HFKER27 | 33 | 926744 | AL157386 | 699 | 1-129 |
| HFKER69 | 34 | 918290 | AC013396 | 700 | 1-502 |
| HFKER69 | 34 | 918290 | AC013396 | 701 | 1-277 |
| | | | | | 502-616 |
| | | | | | 3690-3819 |
| | | | | | 5390-5441 |
| HFKEU09 | 35 | 855045 | AC019214 | 702 | 1-100 |
| | | | | | 482-945 |
| | | | | | 2126-2202 |
| | | | | | 2478-2600 |
| | | | | | 3182-3343 |
| | | | | | 5248-5664 |
| | | | | | 6502-6587 |
| | | | | | 6940-7103 |
| | | | | | 7254-7391 |
| | | | | | 7680-7733 |
| | | | | | 7971-8806 |
| | | | | | 8812-9045 |
| | | | | | 9281-11575 |
| | | | | | 11591-11897 |
| | | | | | 12403-12621 |
| | | | | | 12700-12744 |
| HFKEU09 | 35 | 855045 | AC015551 | 703 | 1-100 |
| | | | | | 482-945 |
| | | | | | 2100-2176 |
| | | | | | 2452-2574 |
| | | | | | 3116-3277 |
| | | | | | 5189-5605 |
| | | | | | 6442-6527 |
| | | | | | 6880-7043 |
| | | | | | 7194-7331 |
| | | | | | 7620-7673 |
| | | | | | 7911-8745 |
| | | | | | 8751-8984 |
| | | | | | 9220-11514 |
| | | | | | 11530-11836 |
| | | | | | 12342-12560 |
| | | | | | 12639-12683 |
| HFKEU09 | 35 | 855045 | AC019214 | 704 | 1-167 |
| | | | | | 257-354 |
| | | | | | 575-718 |
| | | | | | 990-1289 |
| | | | | | 1379-1530 |
| | | | | | 1982-2132 |
| | | | | | 2584-2814 |
| | | | | | 2928-3098 |
| | | | | | 3416-3717 |
| | | | | | 4047-4314 |
| | | | | | 4517-4667 |
| | | | | | 4990-5016 |
| | | | | | 5147-5299 |
| | | | | | 5360-6252 |
| HFKEU09 | 35 | 855045 | AC015551 | 705 | 1-167 |
| | | | | | 257-354 |
| | | | | | 575-672 |
| | | | | | 992-1291 |
| | | | | | 1381-1532 |
| | | | | | 1984-2134 |
| | | | | | 2586-2816 |
| | | | | | 2930-3100 |
| | | | | | 3431-3714 |
| | | | | | 4045-4312 |
| | | | | | 4515-4665 |
| | | | | | 4986-5012 |
| | | | | | 5143-5294 |
| | | | | | 5355-6248 |
| HFKEW23 | 36 | 854952 | AL353801 | 706 | 1-727 |
| HFKEW23 | 36 | 854952 | AL353801 | 707 | 1-837 |
| HFKFB42 | 39 | 522037 | AL109839 | 708 | 1-1091 |
| | | | | | 1327-1458 |
| | | | | | 2095-2434 |
| | | | | | 5393-5501 |
| | | | | | 6605-7036 |
| | | | | | 9708-9880 |
| | | | | | 10516-10580 |
| | | | | | 10796-11504 |
| | | | | | 12943-13099 |
| | | | | | 13380-13848 |
| | | | | | 14050-14420 |
| | | | | | 16213-17031 |
| | | | | | 18080-18301 |
| HFKFE05 | 40 | 932306 | AL049775 | 709 | 1-383 |
| HFKFE05 | 40 | 932306 | AL049775 | 710 | 1-370 |
| HFKFE59 | 42 | 854991 | AC007601 | 711 | 1-593 |
| HFKFE59 | 42 | 854991 | AC037438 | 712 | 1-593 |
| HFKFE59 | 42 | 854991 | AC007601 | 713 | 1-220 |
| HFKFE59 | 42 | 854991 | AC037438 | 714 | 1-220 |
| HFKFI22 | 44 | 930982 | AC013396 | 715 | 1-459 |
| HFKFI22 | 44 | 930982 | AC013396 | 716 | 1-157 |
| HFKFI22 | 44 | 930982 | AC013396 | 717 | 1-200 |
| HFKFN66 | 49 | 511046 | AL359389 | 718 | 1-1384 |
| | | | | | 1747-2350 |
| HFKFO75 | 50 | 573840 | AC073619 | 719 | 1-335 |
| HFKFO75 | 50 | 573840 | AL354745 | 720 | 1-335 |
| HFKFO75 | 50 | 573840 | AC073619 | 721 | 1-224 |
| HFKFO75 | 50 | 573840 | AL354745 | 722 | 1-176 |
| HFKGC14 | 53 | 573785 | AC019124 | 723 | 1-480 |
| HFKGC14 | 53 | 573785 | AC019124 | 724 | 1-264 |
| HFKGD10 | 54 | 968172 | AC015883 | 725 | 1-480 |
| HFKGD10 | 54 | 968172 | AC015883 | 726 | 1-522 |
| HFKGD48 | 55 | 954952 | AC010368 | 727 | 1-420 |
| HFKGD48 | 55 | 954952 | AC010368 | 728 | 1-444 |
| HFKHB46 | 56 | 965767 | AC055792 | 729 | 1-47 |
| | | | | | 1466-1551 |
| | | | | | 1881-3009 |
| HFKHB46 | 56 | 965767 | AL035405 | 730 | 1-87 |
| | | | | | 3979-4108 |
| | | | | | 4445-4939 |
| | | | | | 5138-5294 |
| | | | | | 7382-7428 |
| | | | | | 8845-8930 |
| | | | | | 9260-10388 |
| HFKHB46 | 56 | 965767 | AC055792 | 731 | 1-1559 |
| HFKHB46 | 56 | 965767 | AL035405 | 732 | 1-1559 |
| HFKHB67 | 57 | 965847 | AC021857 | 733 | 1-35 |
| | | | | | 232-952 |
| HFKHD38 | 60 | 854861 | AC040995 | 734 | 1-612 |
| HFKHD38 | 60 | 854861 | AC069030 | 735 | 1-612 |
| HFKHD38 | 60 | 854861 | AC069030 | 736 | 1-590 |
| HFKHF54 | 62 | 855118 | AC067943 | 737 | 1-879 |
| | | | | | 3052-3359 |
| HFKHF54 | 62 | 855118 | AC067943 | 738 | 1-465 |
| HFKHF54 | 62 | 855118 | AC067943 | 739 | 1-623 |
| HFKHG06 | 63 | 965906 | AC004643 | 740 | 1-1151 |
| | | | | | 1269-1388 |
| | | | | | 1489-1633 |
| | | | | | 2129-2539 |
| | | | | | 2655-2804 |
| | | | | | 3076-3506 |
| | | | | | 3614-3734 |
| | | | | | 3804-5071 |
| | | | | | 5163-5218 |
| | | | | | 5299-5402 |
| | | | | | 5493-5570 |
| | | | | | 5666-6156 |
| | | | | | 6257-6375 |
| | | | | | 6671-7129 |
| | | | | | 7353-7440 |
| | | | | | 7709-8851 |
| | | | | | 9077-9456 |
| HFKHG06 | 63 | 965906 | AC004643 | 741 | 1-246 |
| HFKHG06 | 63 | 965906 | AC004643 | 742 | 1-616 |
| | | | | | 694-833 |
| | | | | | 1064-1175 |
| | | | | | 1420-2038 |
| HFKHZ39 | 66 | 928269 | AC009123 | 743 | 1-635 |
| | | | | | 1708-1794 |
| HFKHZ39 | 66 | 928269 | AC009123 | 744 | 1-118 |
| HFKID43 | 67 | 854988 | AC022116 | 745 | 1-537 |
| HFKID43 | 67 | 854988 | AC022116 | 746 | 1-564 |
| HFKID43 | 67 | 854988 | AC022116 | 747 | 1-672 |
| HFKID48 | 68 | 879771 | AC018730 | 748 | 1-53 |
| | | | | | 1553-1660 |
| | | | | | 4422-4614 |
| | | | | | 4641-5155 |
| | | | | | 5981-6234 |
| HFKID48 | 68 | 879771 | AC018730 | 749 | 1-59 |
| | | | | | 352-2091 |
| HFKID48 | 68 | 879771 | AC018730 | 750 | 1-140 |
| HFKIF01 | 69 | 914971 | AC015541 | 751 | 1-210 |
| | | | | | 416-623 |
| | | | | | 845-1481 |
| | | | | | 1820-2565 |
| | | | | | 3128-3565 |
| | | | | | 3626-4034 |
| | | | | | 4318-4416 |
| HFKIF01 | 69 | 914971 | AC018501 | 752 | 1-210 |
| | | | | | 416-623 |
| | | | | | 845-1481 |
| | | | | | 1820-2565 |
| | | | | | 3128-3565 |
| | | | | | 3626-4034 |
| | | | | | 4318-4416 |
| HFKIF01 | 69 | 914971 | AC018816 | 753 | 1-210 |
| | | | | | 416-623 |
| | | | | | 845-1481 |
| | | | | | 1820-2565 |
| | | | | | 3128-3565 |
| | | | | | 3626-4034 |
| | | | | | 4318-4416 |
| HFKIF01 | 69 | 914971 | AC015541 | 754 | 1-382 |
| HFKIF01 | 69 | 914971 | AC018501 | 755 | 1-382 |
| HFKIF01 | 69 | 914971 | AC018816 | 756 | 1-382 |
| HFKIH06 | 71 | 934051 | AL021878 | 757 | 1-814 |
| | | | | | 1532-1652 |
| | | | | | 1791-2285 |
| | | | | | 2588-2900 |
| | | | | | 3277-3506 |
| | | | | | 4106-4504 |
| | | | | | 4651-5299 |
| | | | | | 5432-6325 |
| | | | | | 6595-6648 |
| | | | | | 7112-7229 |
| | | | | | 9857-10545 |
| | | | | | 11800-12045 |
| | | | | | 13750-13860 |
| | | | | | 14992-15089 |
| | | | | | 15126-15234 |
| | | | | | 16713-16887 |
| | | | | | 17559-17687 |
| | | | | | 21811-23565 |
| | | | | | 24540-24804 |
| | | | | | 25938-26263 |
| | | | | | 26678-26895 |
| | | | | | 27833-28312 |
| | | | | | 32924-32968 |
| | | | | | 34093-34274 |
| | | | | | 35551-35990 |
| | | | | | 36375-36727 |
| | | | | | 37669-39039 |
| | | | | | 39351-39826 |
| HFKIH06 | 71 | 934051 | AL021878 | 758 | 1-359 |
| HFKIH06 | 71 | 934051 | AL021878 | 759 | 1-1737 |
| HFKII11 | 73 | 965846 | AL139330 | 760 | 1-468 |
| HFKII11 | 73 | 965846 | AL139330 | 761 | 1-100 |
| HFKII11 | 73 | 965846 | AL139330 | 762 | 1-481 |
| HFKIP11 | 75 | 965072 | AC008743 | 763 | 1-191 |
| | | | | | 774-896 |
| | | | | | 1248-1398 |
| | | | | | 1656-1742 |
| | | | | | 1855-2023 |
| | | | | | 2089-2532 |
| | | | | | 2895-3068 |
| HFKIP11 | 75 | 965072 | AC020909 | 764 | 1-191 |
| | | | | | 774-896 |
| | | | | | 1248-1398 |
| | | | | | 1656-1742 |
| | | | | | 1855-2023 |
| | | | | | 2089-2532 |
| | | | | | 2895-3068 |
| HFKIP11 | 75 | 965072 | AC008743 | 765 | 1-329 |
| | | | | | 746-911 |
| | | | | | 1114-1425 |
| | | | | | 3498-3617 |
| HFKIP11 | 75 | 965072 | AC020909 | 766 | 1-329 |
| | | | | | 749-839 |
| HFKIR40 | 76 | 883093 | AC019071 | 767 | 1-372 |
| | | | | | 414-512 |
| | | | | | 1060-1165 |
| | | | | | 1659-1928 |
| | | | | | 2070-2230 |
| | | | | | 2342-2438 |
| | | | | | 2506-2617 |
| | | | | | 2645-2849 |
| | | | | | 3087-3559 |
| | | | | | 3767-4021 |
| | | | | | 4589-4762 |
| | | | | | 5003-5323 |
| | | | | | 5558-5807 |
| | | | | | 6092-6922 |
| HFKIR40 | 76 | 883093 | AC019071 | 768 | 1-412 |
| HFKIS93 | 77 | 854862 | AC031984 | 769 | 1-1431 |
| HFKIS93 | 77 | 854862 | AC026539 | 770 | 1-2935 |
| HFKIS93 | 77 | 854862 | AL050318 | 771 | 1-1024 |
| | | | | | 1255-1346 |
| | | | | | 1550-1761 |
| | | | | | 1936-2203 |
| | | | | | 3305-3853 |
| | | | | | 4515-4876 |
| | | | | | 4908-5677 |
| | | | | | 7375-7473 |
| | | | | | 8813-11992 |
| HFKIS93 | 77 | 854862 | AL050318 | 772 | 1-1487 |
| HFKIS93 | 77 | 854862 | AL050318 | 773 | 1-115 |
| HFKIV55 | 78 | 922739 | AC068248 | 774 | 1-475 |
| HFKIV55 | 78 | 922739 | AC073160 | 775 | 1-99 |
| | | | | | 1373-1952 |
| | | | | | 2365-2666 |
| | | | | | 4560-4982 |
| | | | | | 5137-5611 |
| | | | | | 6290-6784 |
| | | | | | 7269-7317 |
| | | | | | 8500-8559 |
| HFKIV55 | 78 | 922739 | AC068248 | 776 | 1-423 |
| HFKIV55 | 78 | 922739 | AC068248 | 777 | 1-495 |
| HFKIV55 | 78 | 922739 | AC073160 | 778 | 1-275 |
| HFKIX76 | 80 | 854993 | AC008074 | 779 | 1-88 |
| | | | | | 305-539 |
| | | | | | 737-973 |
| | | | | | 1093-1180 |
| | | | | | 1791-1973 |
| | | | | | 3574-6888 |
| HFKIX76 | 80 | 854993 | AC008074 | 780 | 1-186 |
| HFKJE03 | 81 | 959898 | AC026093 | 781 | 1-482 |
| HFKJK90 | 82 | 926511 | AC022401 | 782 | 1-612 |
| HFKJK90 | 82 | 926511 | AC022401 | 783 | 1-186 |
| HFKJL17 | 83 | 854829 | AC025085 | 784 | 1-699 |
| | | | | | 774-815 |
| | | | | | 1120-1886 |
| | | | | | 1981-4592 |
| | | | | | 4908-5627 |
| HFKJL17 | 83 | 854829 | AL162581 | 785 | 1-699 |
| | | | | | 774-815 |
| | | | | | 1120-1886 |
| | | | | | 1981-2345 |
| | | | | | 2586-2723 |
| | | | | | 2809-4595 |
| | | | | | 4911-5626 |
| | | | | | 8746-9204 |
| | | | | | 9575-10225 |
| HFKJL17 | 83 | 854829 | AL121969 | 786 | 1-699 |
| | | | | | 774-815 |
| | | | | | 1120-1886 |
| | | | | | 1981-4592 |
| | | | | | 4908-5627 |
| | | | | | 8746-9204 |
| | | | | | 9575-10225 |
| HFKJL36 | 84 | 930422 | AC046197 | 787 | 1-548 |
| HFKJL36 | 84 | 930422 | AC007465 | 788 | 1-547 |
| HFKJP08 | 85 | 918312 | AC044859 | 789 | 1-365 |
| HFKJW29 | 86 | 932310 | AP001822 | 790 | 1-385 |
| | | | | | 2074-2451 |
| HFKJW29 | 86 | 932310 | AP000761 | 791 | 1-385 |
| | | | | | 2074-2451 |
| HFKJW29 | 86 | 932310 | AC020997 | 792 | 1-351 |
| HFKJW29 | 86 | 932310 | AP000761 | 793 | 1-75 |
| | | | | | 224-447 |
| | | | | | 1437-3370 |
| HFKJW29 | 86 | 932310 | AP001822 | 794 | 1-75 |
| | | | | | 222-443 |
| | | | | | 1435-3369 |
| HFKKG09 | 87 | 854888 | AL359926 | 795 | 1-591 |
| HFKKG09 | 87 | 854888 | AL359175 | 796 | 1-591 |
| HFKKG09 | 87 | 854888 | AL359926 | 797 | 1-266 |
| HFKKG09 | 87 | 854888 | AL359175 | 798 | 1-266 |
| HFKKM02 | 88 | 918260 | AL356781 | 799 | 1-300 |
| HFKKM02 | 88 | 918260 | AL356781 | 800 | 1-177 |
| HFKKM61 | 89 | 855082 | AC010932 | 801 | 1-533 |
| HFKKM61 | 89 | 855082 | AL133510 | 802 | 1-533 |
| HFKKS48 | 92 | 854927 | AC008749 | 803 | 1-541 |
| HFKKS48 | 92 | 854927 | AC026803 | 804 | 1-497 |
| | | | | | 1331-1441 |
| | | | | | 1539-2079 |
| | | | | | 2914-3038 |
| | | | | | 4330-4471 |
| | | | | | 4831-4987 |
| | | | | | 5304-5446 |
| HFKKS48 | 92 | 854927 | AC026803 | 805 | 1-240 |
| HFKKS48 | 92 | 854927 | AC026803 | 806 | 1-289 |
| HFKLD58 | 95 | 918235 | AC062037 | 807 | 1-674 |
| | | | | | 985-1160 |
| HFKLD58 | 95 | 918235 | AC062037 | 808 | 1-444 |
| HFKLD58 | 95 | 918235 | AC062037 | 809 | 1-1242 |
| HFKLJ15 | 96 | 918247 | AL139260 | 810 | 1-503 |
| HFKLJ15 | 96 | 918247 | AL139260 | 811 | 1-283 |
| HFKLJ15 | 96 | 918247 | AL139260 | 812 | 1-128 |
| HFKLL08 | 97 | 958065 | AC073410 | 813 | 1-878 |
| HFKLL08 | 97 | 958065 | AC073410 | 814 | 1-248 |
| HFKLX38 | 99 | 880220 | AL136383 | 815 | 1-32 |
| | | | | | 1288-1454 |
| | | | | | 1561-1646 |
| | | | | | 3840-4700 |
| | | | | | 5482-6798 |
| HFKLY01 | 100 | 914907 | AC013480 | 816 | 1-154 |
| | | | | | 1410-1729 |
| | | | | | 3081-3322 |
| | | | | | 3480-4064 |
| | | | | | 4551-4675 |
| | | | | | 5305-6348 |
| | | | | | 6596-6706 |
| | | | | | 6872-7414 |
| | | | | | 7421-8472 |
| | | | | | 8530-8709 |
| | | | | | 8913-9839 |
| HFKLY01 | 100 | 914907 | AC013480 | 817 | 1-534 |
| HKDAF84 | 104 | 781937 | AC020633 | 818 | 1-30 |
| | | | | | 341-7207 |
| HKDAF84 | 104 | 781937 | AC020633 | 819 | 1-254 |
| HKDAF84 | 104 | 781937 | AC020633 | 820 | 1-583 |
| HKDBL02 | 107 | 920498 | AC023124 | 821 | 1-506 |
| HKDBL02 | 107 | 920498 | AC012361 | 822 | 1-506 |
| HKIBB08 | 108 | 960371 | AC011639 | 823 | 1-476 |
| HKIBB08 | 108 | 960371 | AC009679 | 824 | 1-641 |
| HKIBB08 | 108 | 960371 | AC016824 | 825 | 1-641 |
| HKIBB08 | 108 | 960371 | AC009679 | 826 | 1-218 |
| HKIBB08 | 108 | 960371 | AC009679 | 827 | 1-195 |
| HKIBB08 | 108 | 960371 | AC016824 | 828 | 1-151 |
| | | | | | 166-224 |
| HKIBB08 | 108 | 960371 | AC016824 | 829 | 1-195 |
| HKIBB81 | 109 | 525592 | AL118558 | 830 | 1-339 |
| HKIBB81 | 109 | 525592 | AC022281 | 831 | 1-339 |
| HKIBB81 | 109 | 525592 | AL118558 | 832 | 1-730 |
| HKIBB81 | 109 | 525592 | AL118558 | 833 | 1-90 |
| HKIBB81 | 109 | 525592 | AC022281 | 834 | 1-90 |
| HKIBB81 | 109 | 525592 | AC022281 | 835 | 1-624 |
| HKIMC34 | 110 | 573424 | AC023906 | 836 | 1-653 |
| HKIMC34 | 110 | 573424 | AC023906 | 837 | 1-396 |
| HKIXA37 | 112 | 735445 | AC015941 | 838 | 1-1559 |
| HKIXA37 | 112 | 735445 | AC021852 | 839 | 1-1745 |
| | | | | | 2030-2499 |
| HKIXA37 | 112 | 735445 | AC021852 | 840 | 1-335 |
| HKIXD42 | 116 | 683533 | AC027225 | 841 | 1-419 |
| HKIXD42 | 116 | 683533 | AF127577 | 842 | 1-418 |
| HKIXD42 | 116 | 683533 | AF127577 | 843 | 1-143 |
| | | | | | 466-768 |
| HKIXI82 | 119 | 779905 | AC011448 | 844 | 1-141 |
| | | | | | 2130-2301 |
| | | | | | 3021-3567 |
| | | | | | 3611-3875 |
| | | | | | 4085-4375 |
| | | | | | 4486-4916 |
| | | | | | 4930-5579 |
| | | | | | 5726-5837 |
| | | | | | 5916-6061 |
| | | | | | 7070-7973 |
| HKIXI82 | 119 | 779905 | AC011448 | 845 | 1-102 |
| HKIXI82 | 119 | 779905 | AC011448 | 846 | 1-544 |
| HKIXX58 | 124 | 666516 | AP000941 | 847 | 1-401 |
| HKIXX58 | 124 | 666516 | AP000714 | 848 | 1-401 |
| HKIXX58 | 124 | 666516 | AP000846 | 849 | 1-400 |
| HKIXX58 | 124 | 666516 | AP000869 | 850 | 1-186 |
| | | | | | 343-743 |
| HKIXX58 | 124 | 666516 | AP000941 | 851 | 1-292 |
| HKIXX58 | 124 | 666516 | AP000714 | 852 | 1-261 |
| HKIXX58 | 124 | 666516 | AP000846 | 853 | 1-292 |
| HKIXX58 | 124 | 666516 | AP000869 | 854 | 1-292 |
| HKIYF45 | 126 | 970756 | AC062010 | 855 | 1-446 |
| HKIYF45 | 126 | 970756 | Z82243 | 856 | 1-446 |
| HKIYF45 | 126 | 970756 | AC062010 | 857 | 1-268 |
| HKIYF45 | 126 | 970756 | AC062010 | 858 | 1-117 |
| HKIYF45 | 126 | 970756 | Z82243 | 859 | 1-268 |
| HKIYF45 | 126 | 970756 | Z82243 | 860 | 1-117 |
| HKIYJ26 | 127 | 927503 | AC018984 | 861 | 1-593 |
| | | | | | 2673-2789 |
| | | | | | 3069-3213 |
| HKIYJ63 | 128 | 703320 | AC008807 | 862 | 1-1113 |
| HKIYJ63 | 128 | 703320 | AC026439 | 863 | 1-1113 |
| HKIYJ63 | 128 | 703320 | AC008807 | 864 | 1-849 |
| HKIYJ63 | 128 | 703320 | AC008807 | 865 | 1-128 |
| HKIYJ63 | 128 | 703320 | AC026439 | 866 | 1-115 |
| HKIYJ63 | 128 | 703320 | AC026439 | 867 | 1-847 |
| HKIYQ89 | 130 | 625636 | AL158834 | 868 | 1-728 |
| | | | | | 1030-1238 |
| | | | | | 1582-1665 |
| HKIYQ89 | 130 | 625636 | AL158834 | 869 | 1-134 |
| | | | | | 506-1282 |
| HKMAA07 | 131 | 954358 | AC012124 | 870 | 1-260 |
| HKMAA07 | 131 | 954358 | AF176680 | 871 | 1-261 |
| HKMAA07 | 131 | 954358 | AC062010 | 872 | 1-226 |
| HKMAA07 | 131 | 954358 | AC015871 | 873 | 1-118 |
| HKMAA07 | 131 | 954358 | AC055735 | 874 | 1-143 |
| HKMAA07 | 131 | 954358 | AC046131 | 875 | 1-238 |
| HKMAA07 | 131 | 954358 | AC044892 | 876 | 1-168 |
| HKMAA07 | 131 | 954358 | AC036181 | 877 | 1-119 |
| HKMAA07 | 131 | 954358 | AC006451 | 878 | 1-992 |
| | | | | | 1238-2766 |
| | | | | | 2970-3258 |
| | | | | | 4727-4925 |
| | | | | | 5365-5841 |
| | | | | | 6281-6790 |
| | | | | | 6934-7264 |
| | | | | | 8088-8627 |
| | | | | | 9080-9148 |
| | | | | | 10250-10345 |
| | | | | | 11254-12473 |
| | | | | | 12516-13371 |
| HKMAA07 | 131 | 954358 | AC006451 | 879 | 1-264 |
| HKMBA17 | 134 | 534523 | AC005293 | 880 | 1-301 |
| HKMBA17 | 134 | 534523 | AC005293 | 881 | 1-421 |
| HKMLD48 | 136 | 575873 | AC012626 | 882 | 1-76 |
| | | | | | 83-286 |
| | | | | | 575-1023 |
| | | | | | 3442-3552 |
| | | | | | 3568-3747 |
| | | | | | 5131-5259 |
| | | | | | 6073-6318 |
| HKMLD48 | 136 | 575873 | AC020816 | 883 | 1-443 |
| HKMLD48 | 136 | 575873 | AC040173 | 884 | 1-76 |
| | | | | | 83-286 |
| | | | | | 575-1023 |
| | | | | | 3445-3736 |
| | | | | | 5120-5248 |
| | | | | | 6062-6307 |
| HKMLD48 | 136 | 575873 | AC012626 | 885 | 1-606 |
| HKMLD48 | 136 | 575873 | AC040173 | 886 | 1-605 |
| HKMLS46 | 140 | 575879 | AC010674 | 887 | 1-321 |
| HKMLS46 | 140 | 575879 | AC010674 | 888 | 1-133 |
| | | | | | 985-1071 |
| | | | | | 1887-2686 |
| HKMLS46 | 140 | 575879 | AC010674 | 889 | 1-149 |
| HKMMF21 | 142 | 969002 | AL139154 | 890 | 1-431 |
| | | | | | 598-1537 |
| | | | | | 2081-2194 |
| | | | | | 2838-2906 |
| | | | | | 3531-3905 |
| | | | | | 3964-4935 |
| | | | | | 6101-6251 |
| | | | | | 6329-6908 |
| | | | | | 8000-8334 |
| | | | | | 8505-8691 |
| | | | | | 8954-9485 |
| | | | | | 9569-10044 |
| | | | | | 10639-11625 |
| | | | | | 12043-12128 |
| | | | | | 12460-12700 |
| | | | | | 13146-13660 |
| HKMMF21 | 142 | 969002 | AL139154 | 891 | 1-3258 |
| | | | | | 3398-3707 |
| HKMMF21 | 142 | 969002 | AL139154 | 892 | 1-359 |
| HKMMG47 | 143 | 720379 | AL160286 | 893 | 1-29 |
| | | | | | 1089-2148 |
| HKMMJ67 | 144 | 575750 | AC013583 | 894 | 1-133 |
| HKMMJ67 | 144 | 575750 | AC015776 | 895 | 1-101 |
| HKMMJ67 | 144 | 575750 | AC008439 | 896 | 1-125 |
| HKMMJ67 | 144 | 575750 | AC021923 | 897 | 1-104 |
| HKMMJ67 | 144 | 575750 | AC020834 | 898 | 1-360 |
| HKMMJ67 | 144 | 575750 | AC021923 | 899 | 1-139 |
| | | | | | 935-1002 |
| HKMMJ67 | 144 | 575750 | AC020834 | 900 | 1-2033 |
| HRABC50 | 148 | 720370 | AC058800 | 901 | 1-722 |
| HRABC50 | 148 | 720370 | AL390294 | 902 | 1-722 |
| HRABC50 | 148 | 720370 | AL159172 | 903 | 1-722 |
| HRABC50 | 148 | 720370 | AC058800 | 904 | 1-709 |
| HRABC50 | 148 | 720370 | AL390294 | 905 | 1-709 |
| HRABC50 | 148 | 720370 | AL159172 | 906 | 1-707 |
| HRABT03 | 150 | 923842 | AC010310 | 907 | 1-547 |
| HRABT03 | 150 | 923842 | AC010308 | 908 | 1-547 |
| HRABT03 | 150 | 923842 | AC010358 | 909 | 1-547 |
| HRABT03 | 150 | 923842 | AC010473 | 910 | 1-547 |
| HRABT03 | 150 | 923842 | AC010310 | 911 | 1-112 |
| HRABT03 | 150 | 923842 | AC010308 | 912 | 1-112 |
| HRABT03 | 150 | 923842 | AC010473 | 913 | 1-112 |
| HRACE09 | 152 | 625425 | AL359176 | 914 | 1-1635 |
| HRACE09 | 152 | 625425 | AC026900 | 915 | 1-2078 |
| | | | | | 2378-2968 |
| | | | | | 3217-4094 |
| | | | | | 4180-4659 |
| | | | | | 4664-6770 |
| | | | | | 6814-7224 |
| HRACE09 | 152 | 625425 | AC060753 | 916 | 1-3585 |
| | | | | | 3715-4305 |
| | | | | | 4546-5403 |
| HRACE09 | 152 | 625425 | AL109937 | 917 | 1-142 |
| HRACE09 | 152 | 625425 | AL356004 | 918 | 1-1636 |
| HRACE09 | 152 | 625425 | AL390296 | 919 | 1-142 |
| HRACE09 | 152 | 625425 | AC027209 | 920 | 1-2282 |
| | | | | | 2412-3002 |
| | | | | | 3469-4126 |
| | | | | | 4211-6401 |
| | | | | | 6472-6802 |
| | | | | | 6854-7412 |
| | | | | | 7505-7877 |
| | | | | | 8817-9469 |
| | | | | | 9531-10355 |
| | | | | | 11182-11518 |
| | | | | | 11841-12049 |
| | | | | | 12639-12673 |
| | | | | | 13026-13612 |
| | | | | | 13639-15711 |
| | | | | | 15745-16135 |
| | | | | | 16215-16907 |
| | | | | | 17307-17773 |
| HRACE09 | 152 | 625425 | AL049742 | 921 | 1-1857 |
| | | | | | 1863-2229 |
| | | | | | 2699-5270 |
| | | | | | 5474-7109 |
| HRACE09 | 152 | 625425 | AL359176 | 922 | 1-2152 |
| HRACE09 | 152 | 625425 | AC026900 | 923 | 1-1310 |
| HRACE09 | 152 | 625425 | AC060753 | 924 | 1-292 |
| HRACE09 | 152 | 625425 | AL109937 | 925 | 1-164 |
| HRACE09 | 152 | 625425 | AL359176 | 926 | 1-1407 |
| HRACE09 | 152 | 625425 | AC026900 | 927 | 1-374 |
| HRACE09 | 152 | 625425 | AL109937 | 928 | 1-666 |
| | | | | | 680-1146 |
| HRACE09 | 152 | 625425 | AL356004 | 929 | 1-761 |
| | | | | | 796-1915 |
| | | | | | 2046-2636 |
| | | | | | 2885-3700 |
| | | | | | 3848-6031 |
| | | | | | 6105-6435 |
| | | | | | 6750-7508 |
| | | | | | 8743-9098 |
| HRACE09 | 152 | 625425 | AL390296 | 930 | 1-665 |
| | | | | | 683-1151 |
| HRACE09 | 152 | 625425 | AL390296 | 931 | 1-502 |
| HRACE09 | 152 | 625425 | AC027209 | 932 | 1-423 |
| HRACE09 | 152 | 625425 | AC027209 | 933 | 1-1301 |
| HRACE09 | 152 | 625425 | AL049742 | 934 | 1-1554 |
| | | | | | 1998-3175 |
| HRACE09 | 152 | 625425 | AL049742 | 935 | 1-762 |
| | | | | | 797-1916 |
| | | | | | 2047-2637 |
| | | | | | 2886-3701 |
| | | | | | 3849-4328 |
| | | | | | 4614-5981 |
| | | | | | 6055-6385 |
| | | | | | 6700-7458 |
| | | | | | 8693-9048 |
| HRACL64 | 155 | 674012 | AL049780 | 936 | 1-33 |
| | | | | | 2486-3028 |
| | | | | | 3593-3681 |
| | | | | | 3828-3889 |
| | | | | | 6854-6907 |
| | | | | | 7350-7545 |
| | | | | | 9474-9717 |
| | | | | | 9723-10077 |
| | | | | | 10527-11087 |
| | | | | | 11166-11594 |
| | | | | | 13231-13400 |
| | | | | | 14027-14327 |
| | | | | | 15465-15573 |
| | | | | | 16076-16238 |
| | | | | | 19959-20368 |
| | | | | | 21799-21859 |
| | | | | | 23602-24438 |
| | | | | | 24694-24797 |
| | | | | | 25509-25961 |
| | | | | | 26557-27070 |
| | | | | | 28587-28750 |
| | | | | | 28843-29088 |
| | | | | | 29996-30215 |
| | | | | | 30398-30446 |
| | | | | | 32541-35115 |
| HRACL64 | 155 | 674012 | AC007055 | 937 | 1-33 |
| | | | | | 2488-3030 |
| | | | | | 3594-3682 |
| | | | | | 3829-3890 |
| | | | | | 6855-6908 |
| | | | | | 7351-7546 |
| | | | | | 9459-9702 |
| | | | | | 9708-10062 |
| | | | | | 10512-11071 |
| | | | | | 11150-11578 |
| | | | | | 13215-13384 |
| | | | | | 14006-14311 |
| | | | | | 15449-15557 |
| | | | | | 16060-16222 |
| | | | | | 19946-20355 |
| | | | | | 21782-21842 |
| | | | | | 23585-24421 |
| | | | | | 25493-25945 |
| | | | | | 26541-27054 |
| | | | | | 28572-28735 |
| | | | | | 28828-29073 |
| | | | | | 29981-30200 |
| | | | | | 32526-35100 |
| HRACL64 | 155 | 674012 | AL049780 | 938 | 1-133 |
| HRACL64 | 155 | 674012 | AL049780 | 939 | 1-295 |
| HRACL64 | 155 | 674012 | AC007055 | 940 | 1-266 |
| HRACL64 | 155 | 674012 | AC007055 | 941 | 1-133 |
| HRACW03 | 157 | 923428 | AC073879 | 942 | 1-490 |
| HRACW36 | 159 | 708201 | AC005746 | 943 | 1-556 |
| HRACW36 | 159 | 708201 | AC005746 | 944 | 1-383 |
| HRACW69 | 160 | 708769 | AL162424 | 945 | 1-539 |
| HRACW69 | 160 | 708769 | AL162424 | 946 | 1-117 |
| HRADP39 | 166 | 732757 | AC024729 | 947 | 1-502 |
| HRAEC03 | 167 | 923401 | AC025710 | 948 | 1-561 |
| HRAEC03 | 167 | 923401 | AL359353 | 949 | 1-561 |
| HRAEC03 | 167 | 923401 | AC025710 | 950 | 1-47 |
| | | | | | 2659-3236 |
| | | | | | 4025-6604 |
| HRAEC03 | 167 | 923401 | AL359353 | 951 | 1-47 |
| | | | | | 2659-3236 |
| | | | | | 4025-6604 |
| HRAEC03 | 167 | 923401 | AC025710 | 952 | 1-389 |
| HRAEC03 | 167 | 923401 | AL359353 | 953 | 1-390 |
| HRKAB10 | 168 | 968272 | AC018431 | 954 | 1-459 |
| HRKAB10 | 168 | 968272 | AL117354 | 955 | 1-201 |
| | | | | | 318-397 |
| | | | | | 1689-2518 |
| | | | | | 2909-3252 |
| | | | | | 3296-4192 |
| | | | | | 4457-4937 |
| | | | | | 5239-5389 |
| | | | | | 8114-8209 |
| | | | | | 9102-9579 |
| | | | | | 10318-10448 |
| HRKAB10 | 168 | 968272 | AL117354 | 956 | 1-160 |
| HRKAB10 | 168 | 968272 | AL117354 | 957 | 1-121 |
| HRKAF31 | 171 | 698347 | AC068942 | 958 | 1-597 |
| | | | | | 1981-2374 |
| | | | | | 2510-2735 |
| | | | | | 3032-3130 |
| | | | | | 3193-4169 |
| | | | | | 4618-4792 |
| HRKAF31 | 171 | 698347 | AC016590 | 959 | 1-976 |
| HRKAF31 | 171 | 698347 | AC012309 | 960 | 1-491 |
| | | | | | 594-1632 |
| | | | | | 3019-3412 |
| | | | | | 3548-3774 |
| | | | | | 4071-4169 |
| | | | | | 4232-5207 |
| | | | | | 5656-5830 |
| HRKAF31 | 171 | 698347 | AC068942 | 961 | 1-304 |
| HRKAF31 | 171 | 698347 | AC016590 | 962 | 1-99 |
| HRKAF31 | 171 | 698347 | AC016590 | 963 | 1-304 |
| HRKAF31 | 171 | 698347 | AC012309 | 964 | 1-148 |
| HRKAF31 | 171 | 698347 | AC012309 | 965 | 1-304 |
| HRKAC62 | 173 | 742429 | AC015919 | 966 | 1-293 |
| HRKAC62 | 173 | 742429 | AC015919 | 967 | 1-293 |
| HRKAC62 | 173 | 742429 | AC007763 | 968 | 1-366 |
| | | | | | 376-740 |
| HRKAC62 | 173 | 742429 | AC016704 | 969 | 1-366 |
| | | | | | 376-740 |
| HRKAC62 | 173 | 742429 | AC015920 | 970 | 1-366 |
| | | | | | 376-668 |
| HRKAC62 | 173 | 742429 | AC007763 | 971 | 1-266 |
| | | | | | 1286-1478 |
| HRKAC62 | 173 | 742429 | AC007763 | 972 | 1-87 |
| HRKAC62 | 173 | 742429 | AC016704 | 973 | 1-266 |
| | | | | | 1284-1490 |
| | | | | | 3464-3826 |
| | | | | | 5158-5320 |
| | | | | | 6212-6300 |
| | | | | | 7623-7838 |
| HRKAC62 | 173 | 742429 | AC016704 | 974 | 1-87 |
| HRKAC62 | 173 | 742429 | AC015920 | 975 | 1-87 |
| HRKAA82 | 175 | 880783 | AC026556 | 976 | 1-1168 |
| HRKAA82 | 175 | 880783 | AC068243 | 977 | 1-1168 |
| HRKAA82 | 175 | 880783 | AC026556 | 978 | 1-626 |
| HRKAA82 | 175 | 880783 | AC026556 | 979 | 1-294 |
| HRKAA82 | 175 | 880783 | AC068243 | 980 | 1-626 |
| HRKAA82 | 175 | 880783 | AC068243 | 981 | 1-279 |
| HRAED30 | 177 | 867176 | AC040169 | 982 | 1-143 |
| | | | | | 1045-1358 |
| | | | | | 1402-2764 |
| | | | | | 3033-3632 |
| | | | | | 3711-4143 |
| | | | | | 6385-7445 |
| | | | | | 8802-9689 |
| HRAEB43 | 178 | 714842 | AP000096 | 983 | 1-2486 |
| | | | | | 3072-3458 |
| | | | | | 3479-3937 |
| | | | | | 5086-5458 |
| HRAEB43 | 178 | 714842 | AP000200 | 984 | 1-2486 |
| | | | | | 3072-3458 |
| | | | | | 3479-3937 |
| | | | | | 5086-5458 |
| HRAEB43 | 178 | 714842 | AP000240 | 985 | 1-387 |
| | | | | | 408-866 |
| HRAEB43 | 178 | 714842 | AP000096 | 986 | 1-89 |
| HRAEB43 | 178 | 714842 | AP000200 | 987 | 1-89 |
| HRAEB43 | 178 | 714842 | AP000240 | 988 | 1-2486 |
| HRAEB43 | 178 | 714842 | AP000240 | 989 | 1-357 |
| HRAEB29 | 179 | 690179 | AC024885 | 990 | 1-3448 |
| HRADR43 | 183 | 714857 | AL359997 | 991 | 1-1563 |
| HRADR21 | 184 | 830039 | AC007386 | 992 | 1-391 |
| HRADK79 | 187 | 774597 | AC016400 | 993 | 1-61 |
| | | | | | 960-1187 |
| | | | | | 1265-1372 |
| | | | | | 1519-1584 |
| | | | | | 1853-2385 |
| | | | | | 2428-2786 |
| | | | | | 3031-4137 |
| HRADK79 | 187 | 774597 | AC016400 | 994 | 1-337 |
| HRADE49 | 188 | 722595 | AL136109 | 995 | 1-3030 |
| | | | | | 3212-3814 |
| | | | | | 9089-9408 |
| | | | | | 11724-12242 |
| | | | | | 12308-12959 |
| | | | | | 23153-23254 |
| | | | | | 24314-26013 |
| HRADE49 | 188 | 722595 | AC023147 | 996 | 1-3041 |
| | | | | | 3223-3825 |
| | | | | | 9096-9415 |
| | | | | | 11730-12248 |
| | | | | | 12314-12965 |
| | | | | | 23152-23259 |
| | | | | | 24319-26018 |
| HRADE49 | 188 | 722595 | AC022219 | 997 | 1-3030 |
| | | | | | 3212-3814 |
| | | | | | 9084-9403 |
| | | | | | 11717-12235 |
| | | | | | 12301-12952 |
| | | | | | 23145-23246 |
| | | | | | 24307-26006 |
| HRADE49 | 188 | 722595 | AL136109 | 998 | 1-344 |
| HRADE49 | 188 | 722595 | AL136109 | 999 | 1-174 |
| HRADE49 | 188 | 722595 | AC023147 | 1000 | 1-122 |
| HRADE49 | 188 | 722595 | AC022219 | 1001 | 1-191 |
| HRADE49 | 188 | 722595 | AC022219 | 1002 | 1-344 |
| HRADA93 | 190 | 792001 | AC010463 | 1003 | 1-56 |
| | | | | | 380-483 |
| | | | | | 579-900 |
| | | | | | 1742-1988 |
| HRADA93 | 190 | 792001 | AC010463 | 1004 | 1-27 |
| | | | | | 934-1247 |
| | | | | | 2557-2685 |
| | | | | | 2850-2960 |
| HRACV73 | 193 | 764141 | AC013322 | 1005 | 1-421 |
| HRACV73 | 193 | 764141 | AC006038 | 1006 | 1-421 |
| HRACV73 | 193 | 764141 | AC013322 | 1007 | 1-308 |
| HRACV73 | 193 | 764141 | AC013322 | 1008 | 1-447 |
| HRACV73 | 193 | 764141 | AC006038 | 1009 | 1-311 |
| HRACV73 | 193 | 764141 | AC006038 | 1010 | 1-447 |
| HRACR57 | 196 | 745443 | AC055863 | 1011 | 1-946 |
| HRACR57 | 196 | 745443 | AC073922 | 1012 | 1-566 |
| HRACR57 | 196 | 745443 | AC055863 | 1013 | 1-284 |
| HRACR49 | 197 | 722524 | AC009568 | 1014 | 1-297 |
| HRACR49 | 197 | 722524 | AC011633 | 1015 | 1-297 |
| HRACR49 | 197 | 722524 | AC011633 | 1016 | 1-335 |
| HRACF04 | 200 | 615036 | AL354833 | 1017 | 1-316 |
| | | | | | 564-1413 |
| | | | | | 1607-1800 |
| | | | | | 2119-2419 |
| | | | | | 3091-4057 |
| | | | | | 4252-4680 |
| | | | | | 7398-7790 |
| | | | | | 8083-8259 |
| | | | | | 8450-8642 |
| | | | | | 9096-11423 |
| | | | | | 11866-13435 |
| HRACF04 | 200 | 615036 | AL354833 | 1018 | 1-121 |
| HRACD65 | 201 | 918345 | AL031297 | 1019 | 1-131 |
| | | | | | 679-912 |
| | | | | | 1349-1654 |
| | | | | | 5029-5252 |
| | | | | | 9376-9493 |
| | | | | | 9736-10204 |
| | | | | | 10953-11302 |
| | | | | | 11525-12122 |
| | | | | | 16952-17243 |
| | | | | | 20848-21153 |
| | | | | | 21457-22062 |
| | | | | | 25001-25396 |
| | | | | | 26949-27023 |
| | | | | | 28082-28430 |
| | | | | | 29411-29548 |
| | | | | | 29680-30123 |
| | | | | | 30797-30981 |
| | | | | | 31120-31308 |
| | | | | | 31959-32425 |
| | | | | | 34705-34876 |
| | | | | | 35061-35527 |
| | | | | | 37354-37502 |
| | | | | | 37933-38190 |
| | | | | | 38381-39650 |
| | | | | | 39839-41256 |
| | | | | | 41488-41511 |
| | | | | | 41519-41916 |
| | | | | | 41983-42104 |
| | | | | | 42275-42855 |
| | | | | | 43391-43461 |
| | | | | | 43574-43656 |
| | | | | | 43857-44292 |
| | | | | | 44317-44421 |
| | | | | | 46115-46231 |
| | | | | | 47800-48512 |
| | | | | | 48841-49208 |
| | | | | | 50149-50247 |
| | | | | | 51377-51502 |
| | | | | | 52685-52984 |
| | | | | | 53118-53307 |
| | | | | | 56807-56996 |
| | | | | | 61413-61503 |
| | | | | | 63173-63224 |
| | | | | | 63579-63659 |
| | | | | | 64464-64659 |
| | | | | | 66082-66208 |
| | | | | | 66720-66871 |
| | | | | | 67311-67472 |
| | | | | | 70450-70513 |
| | | | | | 71257-71408 |
| | | | | | 72162-72215 |
| HRACD65 | 201 | 918345 | AL031297 | 1020 | 1-648 |
| HRACC06 | 202 | 867214 | AC006347 | 1021 | 1-544 |
| HRACC06 | 202 | 867214 | AC006347 | 1022 | 1-532 |
| | | | | | 750-1892 |
| HRACC06 | 202 | 867214 | AC006347 | 1023 | 1-806 |
| HRABZ67 | 206 | 751496 | AC004542 | 1024 | 1-4332 |
| | | | | | 4401-10126 |
| HRABZ67 | 206 | 751496 | AC004542 | 1025 | 1-195 |
| HRABR30 | 207 | 691157 | AL161447 | 1026 | 1-611 |
| HRABR30 | 207 | 691157 | AL161447 | 1027 | 1-368 |
| HRABR30 | 207 | 691157 | AL161447 | 1028 | 1-247 |
| HRABO60 | 208 | 871380 | AL359538 | 1029 | 1-548 |
| HRABO60 | 208 | 871380 | AC013721 | 1030 | 1-155 |
| | | | | | 789-836 |
| | | | | | 978-1056 |
| | | | | | 1143-1690 |
| | | | | | 1707-1999 |
| | | | | | 3621-3762 |
| | | | | | 3849-4168 |
| | | | | | 4886-5085 |
| | | | | | 5994-6080 |
| | | | | | 6441-6513 |
| | | | | | 7498-8147 |
| | | | | | 8651-9220 |
| | | | | | 10275-10381 |
| | | | | | 10687-10988 |
| | | | | | 12904-13077 |
| | | | | | 13332-13417 |
| | | | | | 13623-14029 |
| | | | | | 16366-16446 |
| | | | | | 17409-17507 |
| | | | | | 18127-18230 |
| | | | | | 18280-18693 |
| | | | | | 18709-19020 |
| | | | | | 20417-20713 |
| | | | | | 24618-25701 |
| | | | | | 27490-28016 |
| | | | | | 28378-28720 |
| | | | | | 29486-29516 |
| | | | | | 30017-30581 |
| | | | | | 30641-31070 |
| | | | | | 31505-31744 |
| | | | | | 32436-32725 |
| | | | | | 33178-33363 |
| | | | | | 33487-33630 |
| | | | | | 34031-34157 |
| | | | | | 34251-34807 |
| | | | | | 35077-35422 |
| | | | | | 35460-35863 |
| | | | | | 36979-37467 |
| | | | | | 37750-38006 |
| | | | | | 38169-39169 |
| HRABO60 | 208 | 871380 | AL359763 | 1031 | 1-155 |
| | | | | | 789-836 |
| | | | | | 978-1056 |
| | | | | | 1143-1690 |
| | | | | | 1702-1992 |
| | | | | | 3622-3763 |
| | | | | | 3850-4170 |
| | | | | | 4888-5087 |
| | | | | | 5996-6082 |
| | | | | | 6443-6515 |
| | | | | | 7500-8149 |
| | | | | | 8653-9222 |
| | | | | | 10281-10387 |
| | | | | | 10687-10994 |
| | | | | | 12910-13083 |
| | | | | | 13338-13423 |
| | | | | | 13629-14035 |
| | | | | | 16372-16452 |
| | | | | | 17415-17511 |
| | | | | | 18133-18236 |
| | | | | | 18286-18700 |
| | | | | | 18716-19027 |
| | | | | | 20424-20720 |
| | | | | | 24625-25708 |
| | | | | | 27497-28023 |
| | | | | | 28078-28194 |
| | | | | | 28385-28727 |
| | | | | | 29493-29523 |
| | | | | | 30024-30588 |
| | | | | | 30648-31077 |
| | | | | | 31512-31751 |
| | | | | | 32443-32732 |
| | | | | | 33168-33347 |
| | | | | | 33494-33637 |
| | | | | | 34038-34164 |
| | | | | | 34258-34814 |
| | | | | | 35084-35429 |
| | | | | | 35467-35870 |
| | | | | | 36985-37473 |
| | | | | | 37756-38012 |
| | | | | | 38175-39175 |
| HRABO60 | 208 | 871380 | AL359538 | 1032 | 1-299 |
| HRABO60 | 208 | 871380 | AC013721 | 1033 | 1-397 |
| HRABO60 | 208 | 871380 | AC013721 | 1034 | 1-439 |
| HRABO60 | 208 | 871380 | AL359763 | 1035 | 1-439 |
| HRABO60 | 208 | 871380 | AL359763 | 1036 | 1-397 |
| HRABO08 | 209 | 959104 | AC025597 | 1037 | 1-547 |
| HRABO08 | 209 | 959104 | AL355834 | 1038 | 1-547 |
| HRABO08 | 209 | 959104 | AL161804 | 1039 | 1-547 |
| HRABO08 | 209 | 959104 | AC025597 | 1040 | 1-428 |
| | | | | | 550-1154 |
| HRABO08 | 209 | 959104 | AL355834 | 1041 | 1-439 |
| | | | | | 1615-2106 |
| HRABO08 | 209 | 959104 | AL355834 | 1042 | 1-428 |
| | | | | | 550-1154 |
| HRABO08 | 209 | 959104 | AL161804 | 1043 | 1-428 |
| | | | | | 550-1008 |
| HRABO08 | 209 | 959104 | AL161804 | 1044 | 1-439 |
| | | | | | 1615-2106 |
| HRABM45 | 210 | 875735 | AC003663 | 1045 | 1-1827 |
| HRABM45 | 210 | 875735 | AC003663 | 1046 | 1-559 |
| HRABM45 | 210 | 875735 | AC003663 | 1047 | 1-250 |
| | | | | | 1981-2340 |
| | | | | | 2645-2782 |
| | | | | | 3859-4046 |
| | | | | | 4073-4241 |
| | | | | | 6066-6166 |
| | | | | | 6314-6452 |
| | | | | | 10021-10278 |
| | | | | | 10529-10697 |
| | | | | | 11001-11141 |
| | | | | | 11615-11751 |
| | | | | | 11925-12464 |
| | | | | | 12728-15037 |
| HRABD15 | 211 | 867228 | AC024944 | 1048 | 1-573 |
| | | | | | 670-1471 |
| | | | | | 1710-2231 |
| | | | | | 2681-2716 |
| HRABD15 | 211 | 867228 | AC024911 | 1049 | 1-573 |
| | | | | | 670-1471 |
| | | | | | 1710-2231 |
| | | | | | 2681-2716 |
| HRABD15 | 211 | 867228 | AC024944 | 1050 | 1-545 |
| HRABD15 | 211 | 867228 | AC024911 | 1051 | 1-315 |
| HRABC08 | 212 | 959124 | AC026840 | 1052 | 1-503 |
| HRABC08 | 212 | 959124 | AC007897 | 1053 | 1-453 |
| | | | | | 1564-2870 |
| HRABC08 | 212 | 959124 | AC022221 | 1054 | 1-1294 |
| HRABC08 | 212 | 959124 | AC007897 | 1055 | 1-129 |
| HRABC08 | 212 | 959124 | AC007897 | 1056 | 1-438 |
| HRABC08 | 212 | 959124 | AC022221 | 1057 | 1-438 |
| HRABA59 | 213 | 867239 | AC072049 | 1058 | 1-531 |
| HRABA59 | 213 | 867239 | AC072049 | 1059 | 1-357 |
| HRAAW62 | 215 | 742631 | AC034115 | 1060 | 1-615 |
| HRAAW62 | 215 | 742631 | AC036108 | 1061 | 1-1763 |
| HRAAW62 | 215 | 742631 | AC018999 | 1062 | 1-1766 |
| HRAAW62 | 215 | 742631 | AC036108 | 1063 | 1-146 |
| HRAAW62 | 215 | 742631 | AC018999 | 1064 | 1-307 |
| HRAAM31 | 217 | 945071 | AC073991 | 1065 | 1-1177 |
| HRAAM31 | 217 | 945071 | AC006230 | 1066 | 1-1177 |
| HRAAH86 | 220 | 785398 | AL139331 | 1067 | 1-534 |
| HRAAH86 | 220 | 785398 | AL157697 | 1068 | 1-534 |
| HRAAH86 | 220 | 785398 | AL157697 | 1069 | 1-648 |
| HRAAH86 | 220 | 785398 | AL139331 | 1070 | 1-648 |
| HRAAD24 | 221 | 676567 | AC006208 | 1071 | 1-442 |
| | | | | | 516-699 |
| | | | | | 770-945 |
| | | | | | 1607-1777 |
| | | | | | 1779-2240 |
| | | | | | 2748-3680 |
| | | | | | 4220-4397 |
| HRAAD24 | 221 | 676567 | AC024148 | 1072 | 1-148 |
| | | | | | 263-423 |
| | | | | | 1284-1509 |
| | | | | | 1650-1931 |
| | | | | | 3343-3483 |
| | | | | | 3737-3879 |
| | | | | | 4128-4290 |
| | | | | | 4371-4503 |
| | | | | | 4924-5365 |
| | | | | | 5439-5622 |
| | | | | | 5693-5868 |
| | | | | | 6530-6700 |
| | | | | | 6702-7164 |
| | | | | | 7281-7394 |
| | | | | | 7672-8603 |
| | | | | | 9143-9320 |
| HRAAD24 | 221 | 676567 | AC006208 | 1073 | 1-141 |
| | | | | | 395-537 |
| | | | | | 786-948 |
| | | | | | 1029-1161 |
| HRAAD24 | 221 | 676567 | AC006208 | 1074 | 1-1425 |
| | | | | | 1603-1678 |
| | | | | | 1783-1875 |
| | | | | | 2028-3154 |
| | | | | | 3258-3740 |
| | | | | | 3768-4488 |
| | | | | | 4764-4913 |
| | | | | | 5252-5382 |
| | | | | | 5827-5905 |
| | | | | | 6172-6319 |
| | | | | | 6397-6466 |
| | | | | | 6957-7076 |
| | | | | | 7473-7606 |
| | | | | | 8554-8608 |
| | | | | | 8714-8741 |
| | | | | | 8840-8984 |
| HKPMB95 | 225 | 795060 | AL031650 | 1075 | 1-423 |
| HKPMB95 | 225 | 795060 | AC068624 | 1076 | 1-336 |
| | | | | | 838-1776 |
| | | | | | 1968-2081 |
| HKPMB95 | 225 | 795060 | AL121751 | 1077 | 1-423 |
| HKPMB95 | 225 | 795060 | AC068624 | 1078 | 1-256 |
| HKPMB95 | 225 | 795060 | AL031650 | 1079 | 1-1839 |
| HKPMB95 | 225 | 795060 | AC068624 | 1080 | 1-1574 |
| HKPMB95 | 225 | 795060 | AL121751 | 1081 | 1-921 |
| | | | | | 1179-2159 |
| HKMNC21 | 231 | 575816 | AL035070 | 1082 | 1-445 |
| HKMNC21 | 231 | 575816 | AL035070 | 1083 | 1-589 |
| HKMMY63 | 232 | 745145 | AL031985 | 1084 | 1-703 |
| | | | | | 1291-1889 |
| HKMMY63 | 232 | 745145 | AL031985 | 1085 | 1-129 |
| | | | | | 402-491 |
| | | | | | 5473-5683 |
| | | | | | 6349-6775 |
| HKMMX31 | 233 | 731638 | AC008145 | 1086 | 1-1165 |
| | | | | | 1183-1440 |
| | | | | | 1929-3571 |
| | | | | | 4290-4866 |
| | | | | | 5620-5991 |
| | | | | | 6223-7048 |
| | | | | | 7820-7972 |
| | | | | | 8559-9062 |
| | | | | | 9224-9674 |
| | | | | | 10540-10878 |
| | | | | | 11255-11932 |
| | | | | | 12172-12614 |
| HKMMX31 | 233 | 731638 | AC008145 | 1087 | 1-2343 |
| HKMMX31 | 233 | 731638 | AC008145 | 1088 | 1-1002 |
| HKMMU45 | 234 | 871759 | AC009869 | 1089 | 1-1230 |
| | | | | | 1307-2148 |
| | | | | | 2168-3029 |
| HKMMU45 | 234 | 871759 | AC009869 | 1090 | 1-507 |
| HKMMU45 | 234 | 871759 | AC009869 | 1091 | 1-2222 |
| HKMMR58 | 235 | 736099 | AL162501 | 1092 | 1-373 |
| HKMMR58 | 235 | 736099 | AL353729 | 1093 | 1-373 |
| HKMMR58 | 235 | 736099 | AL353729 | 1094 | 1-116 |
| HKMMR58 | 235 | 736099 | AL353729 | 1095 | 1-546 |
| HKMMJ41 | 236 | 920910 | AC011714 | 1096 | 1-108 |
| | | | | | 1971-2651 |
| | | | | | 2708-3803 |
| HKMMJ41 | 236 | 920910 | AC011714 | 1097 | 1-1481 |
| HKMMJ41 | 236 | 920910 | AC011714 | 1098 | 1-644 |
| HKMMB27 | 237 | 575799 | AC007899 | 1099 | 1-78 |
| | | | | | 911-1060 |
| | | | | | 1125-1525 |
| | | | | | 3006-3125 |
| | | | | | 5016-5230 |
| | | | | | 7331-7408 |
| HKMLY45 | 239 | 575805 | AC021959 | 1100 | 1-418 |
| HKMLO33 | 240 | 859903 | AC027164 | 1101 | 1-680 |
| HKMLO33 | 240 | 859903 | AC024388 | 1102 | 1-680 |
| HKMLO33 | 240 | 859903 | AC027164 | 1103 | 1-93 |
| HKMLO33 | 240 | 859903 | AC024388 | 1104 | 1-93 |
| HKMLO33 | 240 | 859903 | AC027164 | 1105 | 1-119 |
| HKMLO33 | 240 | 859903 | AC024388 | 1106 | 1-119 |
| HKMLF28 | 243 | 705533 | AC008488 | 1107 | 1-1307 |
| | | | | | 1691-2527 |
| HKMLF28 | 243 | 705533 | AC026424 | 1108 | 1-374 |
| | | | | | 1299-2384 |
| | | | | | 3050-3444 |
| | | | | | 3536-3708 |
| | | | | | 4988-5557 |
| | | | | | 5619-5841 |
| | | | | | 5882-6842 |
| | | | | | 7078-9586 |
| | | | | | 9970-10806 |
| HKMLF28 | 243 | 705533 | AC008587 | 1109 | 1-164 |
| | | | | | 2264-2301 |
| | | | | | 2816-3276 |
| | | | | | 4686-4842 |
| | | | | | 5583-5956 |
| | | | | | 6881-7966 |
| | | | | | 8617-9026 |
| | | | | | 9118-9290 |
| | | | | | 10569-11138 |
| | | | | | 11200-11422 |
| | | | | | 11463-12423 |
| | | | | | 12659-15166 |
| | | | | | 15550-16386 |
| HKMLF28 | 243 | 705533 | AC026424 | 1110 | 1-157 |
| HKMLF28 | 243 | 705533 | AC008488 | 1111 | 1-355 |
| HKMLF28 | 243 | 705533 | AC026424 | 1112 | 1-355 |
| HKMLF28 | 243 | 705533 | AC008587 | 1113 | 1-355 |
| HKMLF28 | 243 | 705533 | AC008587 | 1114 | 1-212 |
| | | | | | 3498-4246 |
| | | | | | 4457-4587 |
| | | | | | 7496-7691 |
| | | | | | 11928-12166 |
| | | | | | 13527-13685 |
| | | | | | 14011-14103 |
| HKMLD21 | 244 | 671010 | AC009673 | 1115 | 1-438 |
| HKMLD21 | 244 | 671010 | AC024930 | 1116 | 1-439 |
| | | | | | 999-1481 |
| HKMLD21 | 244 | 671010 | AC019322 | 1117 | 1-438 |
| HKMLD21 | 244 | 671010 | AC009673 | 1118 | 1-115 |
| HKMLD21 | 244 | 671010 | AC019322 | 1119 | 1-297 |
| HKMLC56 | 246 | 733473 | AC005037 | 1120 | 1-642 |
| HKMLC56 | 246 | 733473 | AC005037 | 1121 | 1-404 |
| HKMLC56 | 246 | 733473 | AC005037 | 1122 | 1-310 |
| HKMBC21 | 249 | 670144 | AP000718 | 1123 | 1-435 |
| HKMBC21 | 249 | 670144 | AC026851 | 1124 | 1-435 |
| | | | | | 735-1154 |
| HKMBC21 | 249 | 670144 | AP001351 | 1125 | 1-435 |
| | | | | | 734-1157 |
| HKMBC21 | 249 | 670144 | AP001351 | 1126 | 1-613 |
| HKMBC21 | 249 | 670144 | AP000718 | 1127 | 1-613 |
| HKMBC21 | 249 | 670144 | AC026851 | 1128 | 1-613 |
| HKMBA94 | 250 | 793011 | AC007737 | 1129 | 1-924 |
| HKMBA94 | 250 | 793011 | AC007556 | 1130 | 1-925 |
| HKMBA94 | 250 | 793011 | AC007737 | 1131 | 1-74 |
| | | | | | 243-1037 |
| HKMBA94 | 250 | 793011 | AC007556 | 1132 | 1-640 |
| | | | | | 1526-1768 |
| | | | | | 3142-3412 |
| | | | | | 4485-4610 |
| | | | | | 6381-6484 |
| | | | | | 8584-9086 |
| | | | | | 9503-9635 |
| | | | | | 11363-11561 |
| | | | | | 15129-15311 |
| | | | | | 17376-17893 |
| | | | | | 18236-18646 |
| | | | | | 21077-21228 |
| | | | | | 21777-21948 |
| | | | | | 23054-23493 |
| | | | | | 23662-23902 |
| | | | | | 25370-25589 |
| | | | | | 26807-26985 |
| | | | | | 28007-28203 |
| | | | | | 29232-29477 |
| | | | | | 30172-30300 |
| | | | | | 31261-31381 |
| | | | | | 32224-32440 |
| | | | | | 32729-32844 |
| | | | | | 33577-33694 |
| | | | | | 34720-34857 |
| | | | | | 37342-37464 |
| | | | | | 40796-40924 |
| | | | | | 45893-46023 |
| | | | | | 46989-47124 |
| | | | | | 48792-48938 |
| | | | | | 50432-50598 |
| | | | | | 52368-52497 |
| | | | | | 55908-56280 |
| | | | | | 56436-56657 |
| | | | | | 57473-57649 |
| | | | | | 59906-60018 |
| | | | | | 60603-60722 |
| | | | | | 62851-62943 |
| | | | | | 63788-63853 |
| | | | | | 64025-64143 |
| | | | | | 64688-64819 |
| | | | | | 65902-66001 |
| | | | | | 66584-67062 |
| | | | | | 67143-67869 |
| | | | | | 68004-68496 |
| | | | | | 68545-69613 |
| | | | | | 70712-70820 |
| | | | | | 73163-73483 |
| | | | | | 74310-74383 |
| | | | | | 74552-75346 |
| HKIYT69 | 251 | 843327 | AL031228 | 1133 | 1-352 |
| HKIYT69 | 251 | 843327 | AL031228 | 1134 | 1-325 |
| HKIYT69 | 251 | 843327 | AL031228 | 1135 | 1-113 |
| HKIYS82 | 252 | 779904 | AC015589 | 1136 | 1-1206 |
| | | | | | 1256-4224 |
| HKIYS82 | 252 | 779904 | AC010328 | 1137 | 1-82 |
| | | | | | 355-795 |
| | | | | | 871-998 |
| | | | | | 1300-1582 |
| | | | | | 1629-2248 |
| | | | | | 2727-2918 |
| | | | | | 4474-4729 |
| | | | | | 4876-6190 |
| | | | | | 6240-9439 |
| HKIYS82 | 252 | 779904 | AC015589 | 1138 | 1-299 |
| HKIYS82 | 252 | 779904 | AC010328 | 1139 | 1-179 |
| HKIYS82 | 252 | 779904 | AC010328 | 1140 | 1-570 |
| HKIYN76 | 253 | 770080 | AL161910 | 1141 | 1-1421 |
| HKIYF03 | 256 | 924241 | AC022542 | 1142 | 1-2074 |
| HKIYF03 | 256 | 924241 | AC005384 | 1143 | 1-1037 |
| HKIYF03 | 256 | 924241 | AC022542 | 1144 | 1-680 |
| HKIYF03 | 256 | 924241 | AC005384 | 1145 | 1-680 |
| HKIYC59 | 257 | 868263 | AL137066 | 1146 | 1-855 |
| | | | | | 873-1230 |
| HKIYC59 | 257 | 868263 | AL137066 | 1147 | 1-243 |
| HKIYC59 | 257 | 868263 | AL137066 | 1148 | 1-525 |
| HKIXQ80 | 260 | 775405 | AC011921 | 1149 | 1-443 |
| HKIXQ80 | 260 | 775405 | AC025515 | 1150 | 1-443 |
| HKIXQ80 | 260 | 775405 | AC011921 | 1151 | 1-149 |
| HKIXQ80 | 260 | 775405 | AC025515 | 1152 | 1-149 |
| HKIXQ47 | 261 | 720373 | AC068282 | 1153 | 1-386 |
| | | | | | 426-1484 |
| | | | | | 1594-1896 |
| HKIXQ47 | 261 | 720373 | AC068282 | 1154 | 1-238 |
| HKIXB15 | 262 | 660458 | AC022211 | 1155 | 1-33 |
| | | | | | 1164-1278 |
| | | | | | 1567-2052 |
| | | | | | 3306-3473 |
| HKIXB15 | 262 | 660458 | AC022211 | 1156 | 1-252 |
| HKIMG64 | 265 | 857190 | AC013647 | 1157 | 1-405 |
| HKIMG64 | 265 | 857190 | AC010741 | 1158 | 1-413 |
| HKIMG64 | 265 | 857190 | AL161790 | 1159 | 1-413 |
| HKIMG64 | 265 | 857190 | AC010741 | 1160 | 1-638 |
| HKIMG64 | 265 | 857190 | AL161790 | 1161 | 1-638 |
| HKIMG64 | 265 | 857190 | AC010741 | 1162 | 1-351 |
| HKIMG64 | 265 | 857190 | AL161790 | 1163 | 1-351 |
| HKIBB62 | 267 | 742526 | AC009509 | 1164 | 1-619 |
| HKIBB62 | 267 | 742526 | AC009509 | 1165 | 1-97 |
| | | | | | 978-1034 |
| | | | | | 2318-2377 |
| | | | | | 4978-5150 |
| | | | | | 5615-5647 |
| HKIBB62 | 267 | 742526 | AC009509 | 1166 | 1-389 |
| HFKLK34 | 269 | 907556 | AC022576 | 1167 | 1-722 |
| HFKLK34 | 269 | 907556 | AC022576 | 1168 | 1-321 |
| HFKGB24 | 272 | 677402 | AC007104 | 1169 | 1-802 |
| | | | | | 2342-2695 |
| | | | | | 3074-3189 |
| | | | | | 5319-5633 |
| | | | | | 7248-8571 |
| HFKGB24 | 272 | 677402 | AC069497 | 1170 | 1-117 |
| | | | | | 2470-3367 |
| | | | | | 4908-5262 |
| | | | | | 5641-5756 |
| | | | | | 7886-8200 |
| | | | | | 9815-11138 |
| HFKGB24 | 272 | 677402 | AC007104 | 1171 | 1-453 |
| HFKGB24 | 272 | 677402 | AC069497 | 1172 | 1-453 |
| HFKFI46 | 274 | 586801 | AC005586 | 1173 | 1-337 |
| | | | | | 345-870 |
| | | | | | 1023-1553 |
| | | | | | 2148-3037 |
| | | | | | 3212-3335 |
| HFKFI46 | 274 | 586801 | AC005586 | 1174 | 1-1438 |
| | | | | | 2411-2511 |
| HFKDF03 | 277 | 960977 | AC019131 | 1175 | 1-4679 |
| | | | | | 4858-5322 |
| | | | | | 7433-7916 |
| | | | | | 7918-8276 |
| | | | | | 11359-11661 |
| | | | | | 13034-13322 |
| | | | | | 14921-15217 |
| | | | | | 19170-19416 |
| | | | | | 20116-23855 |
| HFKDF03 | 277 | 960977 | AP002026 | 1176 | 1-484 |
| HFKCO51 | 279 | 725968 | AC074386 | 1177 | 1-470 |
| HFKCO51 | 279 | 725968 | AC004889 | 1178 | 1-470 |
| HFKCO51 | 279 | 725968 | AC074386 | 1179 | 1-527 |
| | | | | | 4449-4476 |
| HFKCO51 | 279 | 725968 | AC004889 | 1180 | 1-527 |
| | | | | | 4447-4552 |
| | | | | | 4726-4968 |
| HFKCG41 | 283 | 712718 | AP002784 | 1181 | 1-654 |
| | | | | | 1182-2920 |
| | | | | | 3315-5990 |
| HFKCC73 | 284 | 742991 | AL161451 | 1182 | 1-37 |
| | | | | | 873-980 |
| | | | | | 1129-1342 |
| | | | | | 1521-1731 |
| | | | | | 3705-3985 |
| | | | | | 4040-4126 |
| | | | | | 5368-5773 |
| | | | | | 5825-6649 |
| HFKCC73 | 284 | 742991 | AL365502 | 1183 | 1-406 |
| | | | | | >458-1282 |
| HFKCC73 | 284 | 742991 | AL365502 | 1184 | 1-245 |
| HFKCC73 | 284 | 742991 | AL161451 | 1185 | 1-245 |
| HFKBC08 | 286 | 960526 | AC025597 | 1186 | 1-966 |
| | | | | | 2536-2698 |
| | | | | | 3500-3602 |
| | | | | | 5005-5242 |
| HFKBC08 | 286 | 960526 | AL161804 | 1187 | 1-966 |
| | | | | | 2536-2698 |
| | | | | | 3500-3602 |
| | | | | | 5005-5242 |
| HFKBC08 | 286 | 960526 | AL355834 | 1188 | 1-966 |
| | | | | | 2534-2696 |
| | | | | | 3498-3600 |
| | | | | | 5003-5240 |
| HFKBC08 | 286 | 960526 | AC025597 | 1189 | 1-200 |
| HFKBC08 | 286 | 960526 | AL161804 | 1190 | 1-200 |
| HFKBC08 | 286 | 960526 | AL355834 | 1191 | 1-200 |
| HCKAA51 | 287 | 534949 | AL022325 | 1192 | 1-154 |
| | | | | | 1810-1865 |
| | | | | | 1947-2233 |
| | | | | | 2391-2757 |
| | | | | | 2828-4196 |
| | | | | | 4215-4421 |
| | | | | | 4990-5074 |
| | | | | | 5133-5294 |
| | | | | | 5676-6489 |
| | | | | | 6529-7035 |
| HCKAA51 | 287 | 534949 | AL031588 | 1193 | 1-154 |
| | | | | | 1810-1865 |
| | | | | | 1947-2233 |
| | | | | | 2391-2757 |
| | | | | | 2828-4196 |
| | | | | | 4215-4421 |
| | | | | | 4990-5074 |
| | | | | | 5133-5294 |
| | | | | | 5676-6489 |
| | | | | | 6529-7035 |
| HCKAA51 | 287 | 534949 | AL022325 | 1194 | 1-875 |
| HCKAA51 | 287 | 534949 | AL031588 | 1195 | 1-875 |
| HBAMD83 | 288 | 573369 | AC044821 | 1196 | 1-326 |
| HBAMD83 | 288 | 573369 | AC044821 | 1197 | 1-155 |
| HBAMD79 | 290 | 573373 | AC011025 | 1198 | 1-263 |
| HBAMD79 | 290 | 573373 | AC011954 | 1199 | 1-263 |
| HBAMD74 | 291 | 573372 | AC064850 | 1200 | 1-384 |
| HBAMD74 | 291 | 573372 | AC064850 | 1201 | 1-450 |
| HBAMD66 | 293 | 750532 | AC001228 | 1202 | 1-646 |
| HBAMD66 | 293 | 750532 | AC001228 | 1203 | 1-144 |
| HBAMD66 | 293 | 750532 | AC001228 | 1204 | 1-611 |
| HBAMD57 | 294 | 573370 | AL133224 | 1205 | 1-359 |
| HBAMD50 | 295 | 864379 | AP000648 | 1206 | 1-1521 |
| HBAMD50 | 295 | 864379 | AP001769 | 1207 | 1-797 |
| | | | | | 1056-2966 |
| | | | | | 3062-3615 |
| HBAMD50 | 295 | 864379 | AP000827 | 1208 | 1-782 |
| | | | | | 893-1689 |
| | | | | | 1948-3858 |
| | | | | | 3954-4507 |
| HBAMD50 | 295 | 864379 | AP001769 | 1209 | 1-70 |
| | | | | | 111-298 |
| HBAMD50 | 295 | 864379 | AP000648 | 1210 | 1-781 |
| | | | | | 892-1688 |
| HBAMD50 | 295 | 864379 | AP000827 | 1211 | 1-1045 |
| HBAMD41 | 296 | 573374 | AC024610 | 1212 | 1-263 |
| HBAMD36 | 297 | 573367 | AC009670 | 1213 | 1-442 |
| HBAMD35 | 298 | 571354 | AC017062 | 1214 | 1-383 |
| HBAMD33 | 299 | 573365 | AC025734 | 1215 | 1-301 |
| HBAMD33 | 299 | 573365 | AC013294 | 1216 | 1-301 |
| HBAMD33 | 299 | 573365 | AC025734 | 1217 | 1-88 |
| HBAMD33 | 299 | 573365 | AC013294 | 1218 | 1-88 |
| HBAMD32 | 300 | 573362 | AL354950 | 1219 | 1-369 |
| HBAMC66 | 303 | 575218 | AC026982 | 1220 | 1-213 |
| HBAMC66 | 303 | 575218 | AC026982 | 1221 | 1-120 |
| HBAMC65 | 304 | 750405 | AL359212 | 1222 | 1-381 |
| HBAMC65 | 304 | 750405 | AL359332 | 1223 | 1-381 |
| HBAMC65 | 304 | 750405 | AL359332 | 1224 | 1-380 |
| HBAMC63 | 305 | 572936 | AC010142 | 1225 | 1-402 |
| HBAMC63 | 305 | 572936 | AL121823 | 1226 | 1-402 |
| HBAMC63 | 305 | 572936 | AL121823 | 1227 | 1-109 |
| HBAMC62 | 306 | 572927 | AL354747 | 1228 | 1-361 |
| HBAMC62 | 306 | 572927 | AL354747 | 1229 | 1-705 |
| HBAMC51 | 308 | 572929 | AC027561 | 1230 | 1-741 |
| HBAMC42 | 309 | 572938 | AL133419 | 1231 | 1-150 |
| HBAMC23 | 312 | 572946 | AL163151 | 1232 | 1-451 |
| HBAMC05 | 313 | 932234 | AL356019 | 1233 | 1-795 |
| | | | | | 3029-3404 |
| | | | | | 5031-5269 |
| | | | | | 6359-6575 |
| | | | | | 6757-6902 |
| | | | | | 7437-7493 |
| | | | | | 9843-9935 |
| | | | | | 10345-10498 |
| | | | | | 11221-11501 |
| | | | | | 11654-11866 |
| | | | | | 12881-13014 |
| | | | | | 14133-14247 |
| | | | | | 16803-17149 |
| | | | | | 17484-17858 |
| HBAMC05 | 313 | 932234 | AL356019 | 1234 | 1-368 |
| HBAMC05 | 313 | 932234 | AL356019 | 1235 | 1-107 |
| HBAGW31 | 314 | 960146 | AC019194 | 1236 | 1-2243 |
| | | | | | 2706-3044 |
| | | | | | 3147-3252 |
| | | | | | 3286-3441 |
| | | | | | 4820-4941 |
| | | | | | 6238-6536 |
| | | | | | 6929-7332 |
| | | | | | 8567-9048 |
| | | | | | 9388-9684 |
| | | | | | 9981-10341 |
| | | | | | 12293-13505 |
| | | | | | 13876-13926 |
| | | | | | 14318-14400 |
| | | | | | 14800-15308 |
| | | | | | 15715-16364 |
| | | | | | 16560-16748 |
| | | | | | 17222-17571 |
| | | | | | 18347-18756 |
| | | | | | 19156-19615 |
| | | | | | 19666-19982 |
| | | | | | 21112-21428 |
| | | | | | 22550-22693 |
| | | | | | 28745-29143 |
| | | | | | 29809-31336 |
| | | | | | 32109-32397 |
| | | | | | 32731-33181 |
| | | | | | 35845-36323 |
| | | | | | 39352-39743 |
| | | | | | 40047-40483 |
| | | | | | 40677-40972 |
| | | | | | 44642-44840 |
| HBAGW31 | 314 | 960146 | AC020759 | 1237 | 1-1528 |
| HBAGW31 | 314 | 960146 | AC005632 | 1238 | 1-1528 |
| HBAGW31 | 314 | 960146 | AC020759 | 1239 | 1-399 |
| HBAGW31 | 314 | 960146 | AC020759 | 1240 | 1-289 |
| HBAGW31 | 314 | 960146 | AC005632 | 1241 | 1-289 |
| HBAGW31 | 314 | 960146 | AC005632 | 1242 | 1-399 |
| HBAGR76 | 315 | 864389 | AC013400 | 1243 | 1-476 |
| HBAGR76 | 315 | 864389 | AC013400 | 1244 | 1-760 |
| HBAGH38 | 316 | 487933 | AC020659 | 1245 | 1-671 |
| | | | | | 703-3178 |
| HBAGH38 | 316 | 487933 | AC020659 | 1246 | 1-309 |
| HBAGH38 | 316 | 487933 | AC020659 | 1247 | 1-276 |
| HBAFU01 | 318 | 916248 | AL355296 | 1248 | 1-474 |
| HBAFU01 | 318 | 916248 | AL355296 | 1249 | 1-320 |
| HBAFU01 | 318 | 916248 | AL355296 | 1250 | 1-143 |
| HBAFP29 | 319 | 690521 | AL353807 | 1251 | 1-957 |
| HBAFP29 | 319 | 690521 | AL353807 | 1252 | 1-155 |
| HBAFF55 | 321 | 753801 | AC021162 | 1253 | 1-967 |
| HBAFF55 | 321 | 753801 | AC021162 | 1254 | 1-1542 |
| HBAFF55 | 321 | 753801 | AC021162 | 1255 | 1-178 |
| HAKAD91 | 324 | 509854 | AC011875 | 1256 | 1-510 |
| HAKAD91 | 324 | 509854 | AP000848 | 1257 | 1-510 |
| HAKAD91 | 324 | 509854 | AP000663 | 1258 | 1-509 |
| HAKAD91 | 324 | 509854 | AP001320 | 1259 | 1-506 |
| HAKAD91 | 324 | 509854 | AP000848 | 1260 | 1-610 |
| HAKAD91 | 324 | 509854 | AC011875 | 1261 | 1-610 |
| HAKAD91 | 324 | 509854 | AP000848 | 1262 | 1-231 |
| HAKAD91 | 324 | 509854 | AP000663 | 1263 | 1-610 |
| HAKAD91 | 324 | 509854 | AP001320 | 1264 | 1-231 |
| HAKAD91 | 324 | 509854 | AP001320 | 1265 | 1-610 |
| HAKAD72 | 325 | 509855 | AP000425 | 1266 | 1-405 |
| HAKAD72 | 325 | 509855 | AP000425 | 1267 | 1-451 |

[0066] Table 1B summarizes additional polynucleotides encompassed by the invention (including cDNA clones related to the sequences (Clone ID NO: Z), contig sequences (contig identifier (Contig ID:) contig nucleotide sequence identifiers (SEQ ID NO: X)), and genomic sequences (SEQ ID NO: B). The first column provides a unique clone identifier, “Clone ID NO: Z”, for a cDNA clone related to each contig sequence. The second column provides the sequence identifier, “SEQ ID NO: X”, for each contig sequence. The third column provides a unique contig identifier, “Contig ID:” for each contig sequence. The fourth column, provides a BAC identifier “BAC ID NO:A” for the BAC clone referenced in the corresponding row of the table. The fifth column provides the nucleotide sequence identifier, “SEQ ID NO: B” for a fragment of the BAC clone identified in column four of the corresponding row of the table. The sixth column, “Exon From-To”, provides the location (i.e., nucleotide position numbers) within the polynucleotide sequence of SEQ ID NO: B which delineate certain polynucleotides of the invention that are also exemplary members of polynucleotide sequences that encode polypeptides of the invention (e.g., polypeptides containing amino acid sequences encoded by the polynucleotide sequences delineated in column six, and fragments and variants thereof).

TABLE 2

| | | SEQ | | | PFam/NR | Score/ | | |
|---|---|---|---|---|---|---|---|---|
| Clone ID | Contig | ID | Analysis | | Accession | Percent | NT | NT |
| NO: Z | ID: | NO: X | Method | PFam/NR Description | Number | Identity | From | To |
| HFKEJ40 | 909830 | 28 | HMMER | PFAM: RhoGAP domain | PF00620 | 21.6 | 59 | 127 |
| | | | 2.1.1 | | | | | |
| HFKEN74 | 974309 | 32 | blastx.2 | (AK002129) unnamed | dbj\|BAA92096.1\| | 47% | 385 | 594 |
| | | | | protein product [Homo | | | | |
| | | | | sapiens] | | | | |
| HFKFI14 | 670322 | 43 | blastx.2 | (AF047437) sperm | gb\|AAC39888.1\| | 73% | 87 | 368 |
| | | | | acrosomal protein [Homo | | | | |
| | | | | sapiens] | | | | |
| HFKFI44 | 929786 | 45 | blastx.2 | The ha0936 gene product | dbj\|BAA07551.1\| | 95% | 8 | 142 |
| | | | | is novel. [Homo sapiens] | | 48% | 136 | 249 |
| | | | | | | 45% | 180 | 296 |
| HFKGA94 | 855099 | 52 | blastx.2 | alternatively spliced | gb\|AAB49034.1\| | 94% | 168 | 221 |
| | | | | product using exon 13A | | 54% | 79 | 144 |
| | | | | [Homo sapiens] | | 61% | 242 | 304 |
| HFKHB46 | 965767 | 56 | blastx.2 | (AL035405) dJ21O18.2 | emb\|CAB46021.1\| | 80% | 187 | 312 |
| | | | | (protein similar to | | 90% | 312 | 344 |
| | | | | collagen) [Homo sapiens] | | | | |
| HFKHE67 | 881093 | 61 | blastx.2 | (AL117662) hypothetical | emb\|CAB56033.1\| | 60% | 121 | 339 |
| | | | | protein [Homo sapiens] | | | | |
| HFKHG06 | 965906 | 63 | blastx.2 | (AK000575) unnamed | dbj\|BAA91265.1\| | 63% | 64 | 198 |
| | | | | protein product [Homo | | | | |
| | | | | sapiens] | | | | |
| HFKHH68 | 961433 | 64 | blastx.2 | (AK000031) unnamed | dbj\|BAA90894.1\| | 92% | 249 | 503 |
| | | | | protein product [Homo | | | | |
| | | | | sapiens] | | | | |
| HFKIP07 | 924825 | 74 | blastx.2 | (AB026288) pharbin | dbj\|BAA82150.1\| | 78% | 214 | 339 |
| | | | | [Rattus norvegicus] | | | | |
| HFKIP11 | 965072 | 75 | HMMER | PFAM: Domain of | PF01958 | 55.5 | 94 | 384 |
| | | | 2.1.1 | unknown function | | | | |
| | | | blastx.2 | cDNA EST | emb\|CAA84799.1\| | 46% | 94 | 384 |
| | | | | EMBL: D67419 comes | | | | |
| | | | | from this gene; cDNA | | | | |
| | | | | EST 11 yk234a7.5 comes | | | | |
| | | | | from this gene; cDNA | | | | |
| | | | | EST yk299a6.3 comes | | | | |
| | | | | from th | | | | |
| HFKIR40 | 883093 | 76 | blastx.2 | (AF151078) HSPC244 | gb\|AAF36164.1\| | 100% | 287 | 397 |
| | | | | [Homo sapiens] | AF151078_1 | 96% | 414 | 503 |
| | | | | | | 73% | 214 | 258 |
| HFKIS93 | 854862 | 77 | blastx.2 | (AL050318) dJ977B1.4 | emb\|CAB75368.1\| | 76% | 3 | 221 |
| | | | | (novel protein similar to | | | | |
| | | | | TGIF 1 | | | | |
| HFKIW31 | 918243 | 79 | HMMER | PFAM: Cyclic nucleotide- | PF00027 | 45.5 | 79 | 231 |
| | | | 2.1.1 | binding domain | | | | |
| | | | blastx.2 | (AB022697) BEC1 | dbj\|BAA83591.1\| | 97% | 94 | 366 |
| | | | | [Rattus norvegicus] | | 68% | 348 | 413 |
| HFKJL17 | 854829 | 83 | blastx.2 | (AK000385) unnamed | dbj\|BAA91131.1\| | 58% | 123 | 221 |
| | | | | protein product [Homo | | 90% | 215 | 244 |
| | | | | sapiens] | | 62% | 40 | 63 |
| HFKJL36 | 930422 | 84 | blastx.2 | (AK000496) unnamed | dbj\|BAA91205.1\| | 75% | 301 | 122 |
| | | | | protein product [Homo | | 53% | 413 | 297 |
| | | | | sapiens] | | | | |
| HFKKS48 | 854927 | 92 | blastx.2 | (AF118082) PRO1902 | gb\|AAF22026.1\| | 40% | 348 | 539 |
| | | | | [Homo sapiens] | AF118094_21 | | | |
| HFKKU68 | 854913 | 93 | blastx.2 | (AF090942) PRO0657 | gb\|AAF24054.1\| | 73% | 411 | 500 |
| | | | | [Homo sapiens] | AF090942_1 | 81% | 308 | 355 |
| | | | | | | 68% | 361 | 408 |
| HFKLD11 | 965830 | 94 | HMMER | PFAM: PH domain | PF00169 | 25.2 | 414 | 530 |
| | | | 2.1.1 | | | | | |
| | | | blastx.2 | IDN4-GGTR14 | sp\|Q9Y6Y5\|Q9Y6Y5 | 91% | 1 | 102 |
| | | | | PROTEIN. | | | | |
| HFKLX38 | 880220 | 99 | HMMER | PFAM: PMP- | PF00822 | 103.9 | 9 | 299 |
| | | | 2.1.1 | 22/EMP/MP20/Claudin | | | | |
| | | | | family | | | | |
| | | | blastx.2 | (AF087825) claudin-7 | gb\|AAD09760.1\| | 44% | 3 | 299 |
| | | | | [Mus musculus] | | | | |
| HKDAF34 | 703405 | 103 | blastx.2 | (AK000496) unnamed | dbj\|BAA91205.1\| | 60% | 18 | 167 |
| | | | | protein product [Homo | | 75% | 175 | 234 |
| | | | | sapiens] | | | | |
| HKDAF84 | 781937 | 104 | blastx.2 | alternatively spliced | gb\|AAB49034.1\| | 72% | 394 | 320 |
| | | | | product using exon 13A | | 67% | 284 | 192 |
| | | | | [Homo sapiens] | | 50% | 195 | 142 |
| HKIXA37 | 735445 | 112 | blastx.2 | (AF091083) unknown | gb\|AAC72952.1\| | 71% | 8 | 349 |
| | | | | [Homo sapiens] | | | | |
| HKIXB03 | 924636 | 113 | HMMER | PFAM: FAD/NAD- | PF00175 | 31.48 | 192 | 326 |
| | | | 1.8 | binding domain in | | | | |
| | | | | oxidoreductases | | | | |
| | | | blastx.2 | (AL133582) hypothetical | emb\|CAB63726.1\| | 85% | 144 | 371 |
| | | | | protein [Homo sapiens] | | | | |
| HKIXG58 | 464241 | 117 | HMMER | PFAM: Phorbol esters/ | PF00130 | 3.59 | 84 | 137 |
| | | | 1.8 | diacylglycerol binding | | | | |
| | | | | domain | | | | |
| HKIXY04 | 736085 | 125 | blastx.2 | homeotic protein Gtx- | pir\|S35304\|S35304 | 100% | 5 | 184 |
| | | | | mouse | | | | |
| HKIYF45 | 970756 | 126 | blastx.2 | (AF010144) neuronal | gb\|AAC08737.1\| | 56% | 68 | 376 |
| | | | | thread protein AD7c-NTP | | 67% | 189 | 377 |
| | | | | [Homo sapiens] | | 50% | 92 | 334 |
| | | | | | | 61% | 249 | 371 |
| | | | | | | 40% | 155 | 256 |
| | | | | | | 47% | 322 | 372 |
| HKIYQ89 | 625636 | 130 | blastx.2 | (AF079765) enhancer of | gb\|AAC64272.1\| | 63% | 8 | 214 |
| | | | | polycomb [Mus musculus] | | 50% | 215 | 238 |
| HKMAA07 | 954358 | 131 | blastx.2 | zinc finger protein [Homo | gb\|AAA59469.1\| | 79% | 149 | 48 |
| | | | | sapiens] | | | | |
| HKMMF21 | 969002 | 142 | blastx.2 | p82 [Homo sapiens] | gb\|AAC50926.1\| | 45% | 242 | 856 |
| | | | | | | 61% | 48 | 233 |
| HKMMG47 | 720379 | 143 | blastx.2 | C. elegans mec-2 | gb\|AAA82333.1\| | 41% | 2 | 271 |
| | | | | (GB: U26735) | | | | |
| | | | | [Caenorhabditis elegans] | | | | |
| HKMMJ67 | 575750 | 144 | blastx.2 | (AF090931) PRO0483 | gb\|AAF24046.1\| | 81% | 104 | 6 |
| | | | | [Homo sapiens] | AF090931_1 | | | |
| HRACL64 | 674012 | 155 | blastx.2 | (AC007055) unknown | gb\|AAD31939.1\| | 88% | 3 | 164 |
| | | | | [Homo sapiens] | AC007055_4 | | | |
| HRADN24 | 877323 | 164 | blastx.2 | (AB023811) TU3A | dbj\|BAA82845.1\| | 69% | 240 | 347 |
| | | | | [Homo sapiens] | | | | |
| HRKAB10 | 968272 | 168 | blastx.2 | metal response element | gb\|AAC34714.1\| | 54% | 156 | 248 |
| | | | | DNA-binding protein | | 85% | 268 | 309 |
| | | | | M96 [Mus musculus] | | | | |
| HRKAB80 | 930473 | 174 | blastx.2 | alternate gene name ygcB; | gb\|AAA69271.1\| | 98% | 2 | 355 |
| | | | | ORF f888 [Escherichia | | | | |
| | | | | coli] | | | | |
| HRADM45 | 717358 | 186 | HMMER | PFAM: Eukaryotic protein | PF00069 | 23.7 | 14 | 124 |
| | | | 1.8 | kinase domain | | | | |
| | | | blastx.2 | (AJ271722) putative | emb\|CAB71146.1\| | 98% | 2 | 469 |
| | | | | serine/threonine protein | | | | |
| | | | | kinase MAK-V [Homo | | | | |
| | | | | sapiens] | | | | |
| HRACX37 | 711466 | 192 | blastx.2 | (AF100753) ancient | gb\|AAD43017.1\| | 97% | 3 | 104 |
| | | | | ubiquitous 46 kDa protein | | 60% | 200 | 382 |
| | | | | AUP1 [Homo sapiens] | | 42% | 348 | 425 |
| HRACV26 | 793997 | 194 | blastx.2 | (AK000385) unnamed | dbj\|BAA91131.1\| | 68% | 46 | 198 |
| | | | | protein product [Homo | | 71% | 179 | 241 |
| | | | | sapiens] | | 92% | 246 | 287 |
| HRACR57 | 745443 | 196 | blastx.2 | (AK000249) unnamed | dbj\|BAA91030.1\| | 100% | 361 | 459 |
| | | | | protein product [Homo | | 94% | 462 | 512 |
| | | | | sapiens] | | | | |
| HRACD65 | 918345 | 201 | blastx.2 | (AL117233) hypothetical | emb\|CAB55300.1\| | 97% | 246 | 377 |
| | | | | protein [Homo sapiens] | | 86% | 419 | 463 |
| | | | | | | 100% | 379 | 417 |
| HRAAI91 | 790090 | 219 | HMMER | PFAM: Zinc-binding | PF00099 | 2.96 | 343 | 384 |
| | | | 1.8 | metalloprotease domain | | | | |
| HRAAD24 | 676567 | 221 | blastx.2 | (AL117428) hypothetical | emb\|CAB55917.1\| | 99% | 135 | 491 |
| | | | | protein [Homo sapiens] | | | | |
| HKPBA75 | 767550 | 226 | blastx.2 | (AF090894) PRO0113 | gb\|AAF24018.1\| | 52% | 294 | 94 |
| | | | | [Homo sapiens] | AF090894_1 | | | |
| HKIYS82 | 779904 | 252 | blastx.2 | (AK000385) unnamed | dbj\|BAA91131.1\| | 82% | 185 | 102 |
| | | | | protein product [Homo | | 84% | 96 | 40 |
| | | | | sapiens] | | | | |
| HKIYC29 | 725699 | 258 | blastx.2 | Contains C3HC4 type | dbj\|BAA13392.1\| | 78% | 131 | 463 |
| | | | | zinc finger signature | | 84% | 3 | 161 |
| | | | | [Homo sapiens] | | | | |
| HKISA86 | 785613 | 264 | blastx.2 | (AL031290) dJ774I24.2 | emb\|CAA20359.1\| | 91% | 79 | 150 |
| | | | | (NEURONAL | | | | |
| | | | | MIGRATION PROTEIN | | | | |
| | | | | ASTROTACTIN) [Homo | | | | |
| | | | | sapiens] | | | | |
| HKIMG03 | 924745 | 266 | blastx.2 | (AK000531) unnamed | dbj\|BAA91235.1\| | 52% | 295 | 501 |
| | | | | protein product [Homo | | | | |
| | | | | sapiens] | | | | |
| HFKLC10 | 963164 | 270 | blastx.2 | unnamed protein product | emb\|CAB42187.1\| | 100% | 1 | 87 |
| | | | | [unidentified] | | | | |
| HFKJP91 | 836476 | 271 | blastx.2 | UDP-GalNAc: polypeptide | emb\|CAA59381.1\| | 62% | 1 | 537 |
| | | | | N-acetylgalactosaminyl | | | | |
| | | | | transferase [Homo | | | | |
| | | | | sapiens] | | | | |
| HFKDE75 | 766436 | 278 | blastx.2 | (AL117424) hypothetical | emb\|CAB55916.1\| | 72% | 43 | 378 |
| | | | | protein [Homo sapiens] | | 66% | 2 | 37 |
| HFKCO02 | 917279 | 280 | blastx.2 | truncated protein | gb\|AAB31222.1\| | 84% | 97 | 20 |
| | | | | [Saccharomyces | | | | |
| | | | | cerevisiae] | | | | |
| HFKBC11 | 967999 | 285 | blastx.2 | (AK000385) unnamed | dbj\|BAA91131.1\| | 69% | 67 | 183 |
| | | | | protein product [Homo | | 62% | 3 | 74 |
| | | | | sapiens] | | | | |
| HFKBC08 | 960526 | 286 | blastx.2 | (AK001512) unnamed | dbj\|BAA91732.1\| | 94% | 150 | 518 |
| | | | | protein product [Homo | | | | |
| | | | | sapiens] | | | | |
| HBAMD41 | 573374 | 296 | blastx.2 | (AK000496) unnamed | dbj\|BAA91205.1\| | 60% | 198 | 55 |
| | | | | protein product [Homo | | 32% | 299 | 207 |
| | | | | sapiens] | | | | |
| HBAMC62 | 572927 | 306 | blastx.2 | (AF113685) PRO0974 | gb\|AAF29584.1\| | 51% | 2 | 235 |
| | | | | [Homo sapiens] | AF113685_1 | | | |
| HBAMC52 | 572935 | 307 | blastx.2 | putative p150 [Homo | gb\|AAC51271.1\| | 70% | 77 | 196 |
| | | | | sapiens] | | 61% | 12 | 74 |
| HBAFV71 | 932783 | 317 | blastx.2 | (AB010441) UDP- | dbj\|BAA75219.1\| | 96% | 68 | 310 |
| | | | | glucuronyltransferase-S | | 89% | 402 | 488 |
| | | | | [Rattus norvegicus] | | 75% | 1 | 75 |
| | | | | | | 84% | 48 | 86 |
| | | | | | | 60% | 304 | 333 |
| HBAFF09 | 926667 | 322 | blastx.2 | (AF184967) heparanase | gb\|AAF04563.1\| | 51% | 16 | 633 |
| | | | | [Rattus norvegicus] | AF184967_1 | | | |

[0067] Table 2 further characterizes certain encoded polypeptides of the invention, by providing the results of comparisons to protein and protein family databases. The first column provides a unique clone identifier, “Clone ID NO:”, corresponding to a cDNA clone disclosed in Table 1A. The second column provides the unique contig indentifier, “Contig ID:” which allows correlation with the information in Table 1A. The third column provides the sequence identifier, “SEQ ID NO: X”, for the contig polynucleotide sequences. The fourth column provides the analysis method by which the homology/identity disclosed in the row was determined. The fifth column provides a description of PFam/NR hits having significant matches identified by each analysis. Column six provides the accession number of the PFam/NR hit disclosed in the fifth column. Column seven, “Score/Percent Identity”, provides a quality score or the percent identity, of the hit disclosed in column five. Comparisons were made between polypeptides encoded by polynucleotides of the invention and a non-redundant protein database (herein referred to as “NR”), or a database of protein families (herein referred to as “PFam”), as described below.

[0068] The NR database, which comprises the NBRF PIR database, the NCBI GenPept database, and the SIB SwissProt and TrEMBL databases, was made non-redundant using the computer program nrdb2 (Warren Gish, Washington University in Saint Louis). Each of the polynucleotides shown in Table 1A, column 3 (e.g., SEQ ID NO: X or the ‘Query’ sequence) was used to search against the NR database. The computer program BLASTX was used to compare a 6-frame translation of the Query sequence to the NR database (for information about the BLASTX algorithm please see Altshul et al., J. Mol. Biol. 215:403-410 (1990), and Gish et al., Nat. Genet. 3:266-272 (1993)). A description of the sequence that is most similar to the Query sequence (the highest scoring ‘Subject’) is shown in column five of Table 2 and the database accession number for that sequence is provided in column six. The highest scoring ‘Subject’ is reported in Table 2 if (a) the estimated probability that the match occurred by chance alone is less than 1.0e-07, and (b) the match was not to a known repetitive element. BLASTX returns alignments of short polypeptide segments of the Query and Subject sequences which share a high degree of similarity; these segments are known as High-Scoring Segment Pairs or HSPs. Table 2 reports the degree of similarity between the Query and the Subject for each HSP as a percent identity in Column 7. The percent identity is determined by dividing the number of exact matches between the two aligned sequences in the HSP, dividing by the number of Query amino acids in the HSP and multiplying by 100. The polynucleotides of SEQ ID NO: X which encode the polypeptide sequence that generates an HSP are delineated by columns 8 and 9 of Table 2.

[0069] The PFam database, PFam version 5.2, (Sonnhammer et al., Nucl. Acids Res., 26:320-322, (1998)) consists of a series of multiple sequence alignments; one alignment for each protein family. Each multiple sequence alignment is converted into a probability model called a Hidden Markov Model, or HMM, that represents the position-specific variation among the sequences that make up the multiple sequence alignment (see, e.g., R. Durbin et al., Biological sequence analysis: probabilistic models of proteins and nucleic acids, Cambridge University Press, 1998 for the theory of HMMs). The program HMMER version 1.8 (Sean Eddy, Washington University in Saint Louis) was used to compare the predicted protein sequence for each Query sequence (SEQ ID NO: Y in Table 1A) to each of the HMMs derived from PFam version 5.2. A HMM derived from PFam version 5.2 was said to be a significant match to a polypeptide of the invention if the score returned by HMMER 1.8 was greater than 0.8 times the HMMER 1.8 score obtained with the most distantly related known member of that protein family. The description of the PFam family which shares a significant match with a polypeptide of the invention is listed in column 5 of Table 2, and the database accession number of the PFam hit is provided in column 6. Column 7 provides the score returned by HMMER version 1.8 for the alignment. Columns 8 and 9 delineate the polynucleotides of SEQ ID NO: X which encode the polypeptide sequence which shows a significant match to a PFam protein family.

[0070] As mentioned, columns 8 and 9 in Table 2, “NT From” and “NT To”, delineate the polynucleotides of “SEQ ID NO: X” that encode a polypeptide having a significant match to the PFam/NR database as disclosed in the fifth column of Table 2. In one embodiment, the invention provides a protein comprising, or alternatively consisting of, a polypeptide encoded by the polynucleotides of SEQ ID NO: X delineated in columns 8 and 9 of Table 2. Also provided are polynucleotides encoding such proteins, and the complementary strand thereto.

[0071] The nucleotide sequence SEQ ID NO: X and the translated SEQ ID NO: Y are sufficiently accurate and otherwise suitable for a variety of uses well known in the art and described further below. For instance, the nucleotide sequences of SEQ ID NO: X are useful for designing nucleic acid hybridization probes that will detect nucleic acid sequences contained in SEQ ID NO: X or the cDNA contained in Clone ID NO: Z. These probes will also hybridize to nucleic acid molecules in biological samples, thereby enabling immediate applications in chromosome mapping, linkage analysis, tissue identification and/or typing, and a variety of forensic and diagnostic methods of the invention. Similarly, polypeptides identified from SEQ ID NO: Y may be used to generate antibodies which bind specifically to these polypeptides, or fragments thereof, and/or to the polypeptides encoded by the cDNA clones identified in, for example, Table 1A.

[0072] Nevertheless, DNA sequences generated by sequencing reactions can contain sequencing errors. The errors exist as misidentified nucleotides, or as insertions or deletions of nucleotides in the generated DNA sequence. The erroneously inserted or deleted nucleotides cause frame shifts in the reading frames of the predicted amino acid sequence. In these cases, the predicted amino acid sequence diverges from the actual amino acid sequence, even though the generated DNA sequence may be greater than 99.9% identical to the actual DNA sequence (for example, one base insertion or deletion in an open reading frame of over 1000 bases).

[0073] Accordingly, for those applications requiring precision in the nucleotide sequence or the amino acid sequence, the present invention provides not only the generated nucleotide sequence identified as SEQ ID NO: X, and a predicted translated amino acid sequence identified as SEQ ID NO: Y, but also a sample of plasmid DNA containing cDNA Clone ID NO: Z (deposited with the ATCC on Oct. 5, 2000, and receiving ATCC designation numbers PTA 2574 and PTA 2575; deposited with the ATCC on Jan. 5, 2001, having the depositor reference numbers TS-1, TS-2, AC-1, and AC-2; and/or as set forth, for example, in Table 1A, 6 and 7). The nucleotide sequence of each deposited clone can readily be determined by sequencing the deposited clone in accordance with known methods. Further, techniques known in the art can be used to verify the nucleotide sequences of SEQ ID NO: X.

[0074] The predicted amino acid sequence can then be verified from such deposits. Moreover, the amino acid sequence of the protein encoded by a particular clone can also be directly determined by peptide sequencing or by expressing the protein in a suitable host cell containing the deposited human cDNA, collecting the protein, and determining its sequence.

[0075] RACE Protocol For Recovery of Full-Length Genes

[0076] Partial cDNA clones can be made full-length by utilizing the rapid amplification of cDNA ends (RACE) procedure described in Frohman, M. A., et al., Proc. Nat'l. Acad. Sci. USA, 85:8998-9002 (1988). A cDNA clone missing either the 5′ or 3′ end can be reconstructed to include the absent base pairs extending to the translational start or stop codon, respectively. In some cases, cDNAs are missing the start codon of translation. The following briefly describes a modification of this original 5′ RACE procedure. Poly A+ or total RNA is reverse transcribed with Superscript II (Gibco/BRL) and an antisense or complementary primer specific to the cDNA sequence. The primer is removed from the reaction with a Microcon Concentrator (Amicon). The first-strand cDNA is then tailed with dATP and terminal deoxynucleotide transferase (Gibco/BRL). Thus, an anchor sequence is produced which is needed for PCR amplification. The second strand is synthesized from the dA-tail in PCR buffer, Taq DNA polymerase (Perkin-Elmer Cetus), an oligo-dT primer containing three adjacent restriction sites (XhoI, SalI and ClaI) at the 5′ end and a primer containing just these restriction sites. This double-stranded cDNA is PCR amplified for 40 cycles with the same primers as well as a nested cDNA-specific antisense primer. The PCR products are size-separated on an ethidium bromide-agarose gel and the region of gel containing cDNA products the predicted size of missing protein-coding DNA is removed. cDNA is purified from the agarose with the Magic PCR Prep kit (Promega), restriction digested with XhoI or SalI, and ligated to a plasmid such as pBluescript SKII (Stratagene) at XhoI and EcoRV sites. This DNA is transformed into bacteria and the plasmid clones sequenced to identify the correct protein-coding inserts. Correct 5′ ends are confirmed by comparing this sequence with the putatively identified homologue and overlap with the partial cDNA clone. Similar methods known in the art and/or commercial kits are used to amplify and recover 3′ ends.

[0077] Several quality-controlled kits are commercially available for purchase. Similar reagents and methods to those above are supplied in kit form from Gibco/BRL for both 5′ and 3′ RACE for recovery of full length genes. A second kit is available from Clontech which is a modification of a related technique, SLIC (single-stranded ligation to single-stranded cDNA), developed by Dumas et al., Nucleic Acids Res., 19:5227-32 (1991). The major differences in procedure are that the RNA is alkaline hydrolyzed after reverse transcription and RNA ligase is used to join a restriction site-containing anchor primer to the first-strand cDNA. This obviates the necessity for the dA-tailing reaction which results in a polyT stretch that is difficult to sequence past.

[0078] An alternative to generating 5′ or 3′ cDNA from RNA is to use cDNA library double-stranded DNA. An asymmetric PCR-amplified antisense cDNA strand is synthesized with an antisense cDNA-specific primer and a plasmid-anchored primer. These primers are removed and a symmetric PCR reaction is performed with a nested cDNA-specific antisense primer and the plasmid-anchored primer.

[0079] RNA Ligase Protocol for Generating the 5′ or 3′ End Sequences to Obtain Full Length Genes

[0080] Once a gene of interest is identified, several methods are available for the identification of the 5′ or 3′ portions of the gene which may not be present in the original cDNA plasmid. These methods include, but are not limited to, filter probing, clone enrichment using specific probes and protocols similar and identical to 5′ and 3′ RACE. While the full length gene may be present in the library and can be identified by probing, a useful method for generating the 5′ or 3′ end is to use the existing sequence information from the original cDNA to generate the missing information. A method similar to 5′ RACE is available for generating the missing 5′ end of a desired full-length gene. (This method was published by Fromont-Racine et al., Nucleic Acids Res., 21(7):1683-1684 (1993)). Briefly, a specific RNA oligonucleotide is ligated to the 5′ ends of a population of RNA presumably containing full-length gene RNA transcript. A primer set containing a primer specific to the ligated RNA oligonucleotide and a primer specific to a known sequence of the gene of interest, is used to PCR amplify the 5′ portion of the desired full length gene which may then be sequenced and used to generate the full length gene. This method starts with total RNA isolated from the desired source, poly A RNA may be used but is not a prerequisite for this procedure. The RNA preparation may then be treated with phosphatase if necessary to eliminate 5′ phosphate groups on degraded or damaged RNA, which may interfere with the later RNA ligase step. The phosphatase, if used, is then inactivated and the RNA is treated with tobacco acid pyrophosphatase in order to remove the cap structure present at the 5′ ends of messenger RNAs. This reaction leaves a 5′ phosphate group at the 5′ end of the cap cleaved RNA which can then be ligated to an RNA oligonucleotide using T4 RNA ligase. This modified RNA preparation can then be used as a template for first strand cDNA synthesis using a gene specific oligonucleotide. The first strand synthesis reaction can then be used as a template for PCR amplification of the desired 5′ end using a primer specific to the ligated RNA oligonucleotide and a primer specific to the known sequence of the excretory system antigen of interest. The resultant product is then sequenced and analyzed to confirm that the 5′ end sequence belongs to the relevant excretory system antigen.

[0081] The present invention also relates to vectors or plasmids, which include such DNA sequences, as well as the use of the DNA sequences. The material deposited with the ATCC (deposited with the ATCC on Oct. 5, 2000, and receiving ATCC designation numbers PTA 2574 and PTA 2575; deposited with the ATCC on Jan. 5, 2001, having the depositor reference numbers TS-1, TS-2, AC-1, and AC-2; and/or as set forth, for example, in Table 1A, 6 and 7) is a mixture of cDNA clones derived from a variety of human tissue and cloned in either a plasmid vector or a phage vector, as shown, for example, in Table 7. These deposits are referred to as “the deposits” herein. The tissues from which some of the clones were derived are listed in Table 7, and the vector in which the corresponding cDNA is contained is also indicated in Table 7. The deposited material includes cDNA clones corresponding to SEQ ID NO: X described, for example, in Table 1A (Clone ID NO: Z). A clone which is isolatable from the ATCC Deposits by use of a sequence listed as SEQ ID NO: X, may include the entire coding region of a human gene or in other cases such clone may include a substantial portion of the coding region of a human gene. Furthermore, although the sequence listing may in some instances list only a portion of the DNA sequence in a clone included in the ATCC Deposits, it is well within the ability of one skilled in the art to sequence the DNA included in a clone contained in the ATCC Deposits by use of a sequence (or portion thereof) described in, for example Tables 1A or 2 by procedures hereinafter further described, and others apparent to those skilled in the art.

[0082] Also provided in Table 7 is the name of the vector which contains the cDNA clone. Each vector is routinely used in the art. The following additional information is provided for convenience.

[0083] Vectors Lambda Zap (U.S. Pat. Nos. 5,128,256 and 5,286,636), Uni-Zap XR (U.S. Pat. Nos. 5,128,256 and 5,286,636), Zap Express (U.S. Pat. Nos. 5,128,256 and 5,286,636), pBluescript (pBS) (Short, J. M. et al., Nucleic Acids Res. 16:7583-7600 (1988); Alting-Mees, M. A. and Short, J. M., Nucleic Acids Res. 17:9494 (1989)) and pBK (Alting-Mees, M. A. et al., Strategies 5:58-61 (1992)) are commercially available from Stratagene Cloning Systems, Inc., 11011 N. Torrey Pines Road, La Jolla, Calif., 92037. pBS contains an ampicillin resistance gene and pBK contains a neomycin resistance gene. Phagemid pBS may be excised from the Lambda Zap and Uni-Zap XR vectors, and phagemid pBK may be excised from the Zap Express vector. Both phagemids may be transformed into E. coli strain XL-1 Blue, also available from Stratagene.

[0084] Vectors pSport1, pCMVSport 1.0, pCMVSport 2.0 and pCMVSport 3.0, were obtained from Life Technologies, Inc., P.O. Box 6009, Gaithersburg, Md. 20897. All Sport vectors contain an ampicillin resistance gene and may be transformed into E. coli strain DH10B, also available from Life Technologies. See, for instance, Gruber, C. E., et al., Focus 15:59-(1993). Vector lafmid B A (Bento Soares, Columbia University, New York, N.Y.) contains an ampicillin resistance gene and can be transformed into E. coli strain XL-1 Blue. Vector pCR® 2.1, which is available from Invitrogen, 1600 Faraday Avenue, Carlsbad, Calif. 92008, contains an ampicillin resistance gene and may be transformed into E. coli strain DH10B, available from Life Technologies. See, for instance, Clark, J. M., Nuc. Acids Res. 16:9677-9686 (1988) and Mead, D. et al., Bio/Technology 9: (1991).

[0085] The present invention also relates to the genes corresponding to SEQ ID NO: X, SEQ ID NO: Y, and/or the deposited clone (Clone ID NO: Z). The corresponding gene can be isolated in accordance with known methods using the sequence information disclosed herein. Such methods include preparing probes or primers from the disclosed sequence and identifying or amplifying the corresponding gene from appropriate sources of genomic material.

[0086] Also provided in the present invention are allelic variants, orthologs, and/or species homologs. Procedures known in the art can be used to obtain full-length genes, allelic variants, splice variants, full-length coding portions, orthologs, and/or species homologs of excretory system associated genes corresponding to SEQ ID NO: X or the complement thereof, polypeptides encoded by SEQ ID NO: X or the complement thereof, and/or the cDNA contained in Clone ID NO: Z, using information from the sequences disclosed herein or the clones deposited with the ATCC. For example, allelic variants and/or species homologs may be isolated and identified by making suitable probes or primers from the sequences provided herein and screening a suitable nucleic acid source for allelic variants and/or the desired homologue.

[0087] The polypeptides of the invention can be prepared in any suitable manner. Such polypeptides include isolated naturally occurring polypeptides, recombinantly produced polypeptides, synthetically produced polypeptides, or polypeptides produced by a combination of these methods. Means for preparing such polypeptides are well understood in the art.

[0088] The polypeptides may be in the form of the secreted protein, including the mature form, or may be a part of a larger protein, such as a fusion protein (see below). It is often advantageous to include an additional amino acid sequence which contains secretory or leader sequences, pro-sequences, sequences which aid in purification, such as multiple histidine residues, or an additional sequence for stability during recombinant production.

[0089] The polypeptides of the present invention are preferably provided in an isolated form, and preferably are substantially purified. A recombinantly produced version of a polypeptide, including the secreted polypeptide, can be substantially purified using techniques described herein or otherwise known in the art, such as, for example, by the one-step method described in Smith and Johnson, Gene 67:31-40 (1988). Polypeptides of the invention also can be purified from natural, synthetic or recombinant sources using techniques described herein or otherwise known in the art, such as, for example, antibodies of the invention raised against the excretory system polypeptides of the present invention in methods which are well known in the art.

[0090] The present invention provides a polynucleotide comprising, or alternatively consisting of, the nucleic acid sequence of SEQ ID NO: X, and/or the cDNA sequence contained in Clone ID NO: Z. The present invention also provides a polypeptide comprising, or alternatively, consisting of, the polypeptide sequence of SEQ ID NO: Y, a polypeptide encoded by SEQ ID NO: X or a complement thereof, a polypeptide encoded by the cDNA contained in Clone ID NO: Z, and/or the polypeptide sequence encoded by a nucleotide sequence in SEQ ID NO: B as defined in column 6 of Table 1B. Polynucleotides encoding a polypeptide comprising, or alternatively consisting of the polypeptide sequence of SEQ ID NO: Y, a polypeptide encoded by SEQ ID NO: X, a polypeptide encoded by the cDNA contained in Clone ID NO: Z and/or a polypeptide sequence encoded by a nucleotide sequence in SEQ ID NO: B as defined in column 6 of Table 1B are also encompassed by the invention. The present invention further encompasses a polynucleotide comprising, or alternatively consisting of, the complement of the nucleic acid sequence of SEQ ID NO: X, a nucleic acid sequence encoding a polypeptide encoded by the complement of the nucleic acid sequence of SEQ ID NO: X, and/or the cDNA contained in Clone ID NO: Z.

[0091] Moreover, representative examples of polynucleotides of the invention comprise, or alternatively consist of, one, two, three, four, five, six, seven, eight, nine, ten, or more of the sequences delineated in Table 1B column 6, or any combination thereof. Additional, representative examples of polynucleotides of the invention comprise, or alternatively consist of, one, two, three, four, five, six, seven, eight, nine, ten, or more of the complementary strand(s) of the sequences delineated in Table 1B column 6, or any combination thereof. In further embodiments, the above-described polynucleotides of the invention comprise, or alternatively consist of, sequences delineated in Table 1B, column 6, and have a nucleic acid sequence which is different from that of the BAC fragment having the sequence disclosed in SEQ ID NO: B (see Table 1B, column 5). In additional embodiments, the above-described polynucleotides of the invention comprise, or alternatively consist of, sequences delineated in Table 1B, column 6, and have a nucleic acid sequence which is different from that published for the BAC clone identified as BAC ID NO:A (see Table 1B, column 4). In additional embodiments, the above-described polynucleotides of the invention comprise, or alternatively consist of, sequences delineated in Table 1B, column 6, and have a nucleic acid sequence which is different from that contained in the BAC clone identified as BAC ID NO: A (see Table 1B, column 4). Polypeptides encoded by these polynucleotides, other polynucleotides that encode these polypeptides, and antibodies that bind these polypeptides are also encompassed by the invention. Additionally, fragments and variants of the above-described polynucleotides and polypeptides are also encompassed by the invention.

[0092] Further, representative examples of polynucleotides of the invention comprise, or alternatively consist of, one, two, three, four, five, six, seven, eight, nine, ten, or more of the sequences delineated in column 6 of Table 1B which correspond to the same Clone ID NO: Z (see Table 1B, column 1), or any combination thereof. Additional, representative examples of polynucleotides of the invention comprise, or alternatively consist of, one, two, three, four, five, six, seven, eight, nine, ten, or more of the complementary strand(s) of the sequences delineated in column 6 of Table 1B which correspond to the same Clone ID NO: Z (see Table 1B, column 1), or any combination thereof. In further embodiments, the above-described polynucleotides of the invention comprise, or alternatively consist of, sequences delineated in column 6 of Table 1B which correspond to the same Clone ID NO: Z (see Table 1B, column 1) and have a nucleic acid sequence which is different from that of the BAC fragment having the sequence disclosed in SEQ ID NO: B (see Table 1B, column 5). In additional embodiments, the above-described polynucleotides of the invention comprise, or alternatively consist of, sequences delineated in column 6 of Table 1B which correspond to the same Clone ID NO: Z (see Table 1B, column 1) and have a nucleic acid sequence which is different from that published for the BAC clone identified as BAC ID NO: A (see Table 1B, column 4). In additional embodiments, the above-described polynucleotides of the invention comprise, or alternatively consist of, sequences delineated in column 6 of Table 1B which correspond to the same Clone ID NO: Z (see Table 1B, column 1) and have a nucleic acid sequence which is different from that contained in the BAC clone identified as BAC ID NO: A (see Table 1B, column 4). Polypeptides encoded by these polynucleotides, other polynucleotides that encode these polypeptides, and antibodies that bind these polypeptides are also encompassed by the invention. Additionally, fragments and variants of the above-described polynucleotides and polypeptides are also encompassed by the invention.

[0093] Further, representative examples of polynucleotides of the invention comprise, or alternatively consist of, one, two, three, four, five, six, seven, eight, nine, ten, or more of the sequences delineated in column 6 of Table 1B which correspond to the same contig sequence identifer SEQ ID NO: X (see Table 1B, column 2), or any combination thereof. Additional, representative examples of polynucleotides of the invention comprise, or alternatively consist of, one, two, three, four, five, six, seven, eight, nine, ten, or more of the complementary strand(s) of the sequences delineated in column 6 of Table 1B which correspond to the same contig sequence identifer SEQ ID NO: X (see Table 1B, column 2), or any combination thereof. In further embodiments, the above-described polynucleotides of the invention comprise, or alternatively consist of, sequences delineated in column 6 of Table 1B which correspond to the same contig sequence identifer SEQ ID NO: X (see Table 1B, column 2) and have a nucleic acid sequence which is different from that of the BAC fragment having the sequence disclosed in SEQ ID NO: B (see Table 1B, column 5). In additional embodiments, the above-described polynucleotides of the invention comprise, or alternatively consist of, sequences delineated in column 6 of Table 1B which correspond to the same contig sequence identifer SEQ ID NO: X (see Table 1B, column 2) and have a nucleic acid sequence which is different from that published for the BAC clone identified as BAC ID NO: A (see Table 1B, column 4). In additional embodiments, the above-described polynucleotides of the invention comprise, or alternatively consist of, sequences delineated in column 6 of Table 1B which correspond to the same contig sequence identifer SEQ ID NO: X (see Table 1B, column 2) and have a nucleic acid sequence which is different from that contained in the BAC clone identified as BAC ID NO: A (See Table 1B, column 4). Polypeptides encoded by these polynucleotides, other polynucleotides that encode these polypeptides, and antibodies that bind these polypeptides are also encompassed by the invention. Additionally, fragments and variants of the above-described polynucleotides and polypeptides are also encompassed by the invention.

[0094] Moreover, representative examples of polynucleotides of the invention comprise, or alternatively consist of, one, two, three, four, five, six, seven, eight, nine, ten, or more of the sequences delineated in the same row of Table 1B column 6, or any combination thereof. Additional, representative examples of polynucleotides of the invention comprise, or alternatively consist of, one, two, three, four, five, six, seven, eight, nine, ten, or more of the complementary strand(s) of the sequences delineated in the same row of Table 1B column 6, or any combination thereof. In preferred embodiments, the polynucleotides of the invention comprise, or alternatively consist of, one, two, three, four, five, six, seven, eight, nine, ten, or more of the complementary strand(s) of the sequences delineated in the same row of Table 1B column 6, wherein sequentially delineated sequences in the table (i.e. corresponding to those exons located closest to each other) are directly contiguous in a 5′ to 3′ orientation. In further embodiments, above-described polynucleotides of the invention comprise, or alternatively consist of, sequences delineated in the same row of Table 1B, column 6, and have a nucleic acid sequence which is different from that of the BAC fragment having the sequence disclosed in SEQ ID NO: B (see Table 1B, column 5). In additional embodiments, the above-described polynucleotides of the invention comprise, or alternatively consist of, sequences delineated in the same row of Table 1B, column 6, and have a nucleic acid sequence which is different from that published for the BAC clone identified as BAC ID NO: A (see Table 1B, column 4). In additional embodiments, the above-described polynucleotides of the invention comprise, or alternatively consist of, sequences delineated in the same row of Table 1B, column 6, and have a nucleic acid sequence which is different from that contained in the BAC clone identified as BAC ID NO: A (see Table 1B, column 4). Polypeptides encoded by these polynucleotides, other polynucleotides that encode these polypeptides, and antibodies that bind these polypeptides are also encompassed by the invention.

[0095] In additional specific embodiments, polynucleotides of the invention comprise, or alternatively consist of, one, two, three, four, five, six, seven, eight, nine, ten, or more of the sequences delineated in column 6 of Table 1B, and the polynucleotide sequence of SEQ ID NO: X (e.g., as defined in Table 1B, column 2) or fragments or variants thereof. Polypeptides encoded by these polynucleotides, other polynucleotides that encode these polypeptides, and antibodies that bind these polypeptides are also encompassed by the invention.

[0096] In additional specific embodiments, polynucleotides of the invention comprise, or alternatively consist of, one, two, three, four, five, six, seven, eight, nine, ten, or more of the sequences delineated in column 6 of Table 1B which correspond to the same Clone ID NO: Z (see Table 1B, column 1), and the polynucleotide sequence of SEQ ID NO: X (e.g., as defined in Table 1A or 1B) or fragments or variants thereof. In preferred embodiments, the delineated sequence(s) and polynucleotide sequence of SEQ ID NO: X correspond to the same Clone ID NO: Z. Polypeptides encoded by these polynucleotides, other polynucleotides that encode these polypeptides, and antibodies that bind these polypeptides are also encompassed by the invention

[0097] In further specific embodiments, polynucleotides of the invention comprise, or alternatively consist of, one, two, three, four, five, six, seven, eight, nine, ten, or more of the sequences delineated in the same row of column 6 of Table 1B, and the polynucleotide sequence of SEQ ID NO: X (e.g., as defined in Table 1A or 1B) or fragments or variants thereof. In preferred embodiments, the delineated sequence(s) and polynucleotide sequence of SEQ ID NO: X correspond to the same row of column 6 of Table 1B. Polypeptides encoded by these polynucleotides, other polynucleotides that encode these polypeptides, and antibodies that bind these polypeptides are also encompassed by the invention.

[0098] In additional specific embodiments, polynucleotides of the invention comprise, or alternatively consist of a polynucleotide sequence in which the 3′ 10 polynucleotides of one of the sequences delineated in column 6 of Table 1B and the 5′ 10 polynucleotides of the sequence of SEQ ID NO: X are directly contiguous. Nucleic acids which hybridize to the complement of these 20 contiguous polynucleotides under stringent hybridization conditions or alternatively, under lower stringency conditions, are also encompassed by the invention. Polypeptides encoded by these polynucleotides and/or nucleic acids, other polynucleotides and/or nucleic acids that encode these polypeptides, and antibodies that bind these polypeptides are also encompassed by the invention. Additionally, fragments and variants of the above-described polynucleotides, nucleic acids, and polypeptides are also encompassed by the invention.

[0099] In additional specific embodiments, polynucleotides of the invention comprise, or alternatively consist of, a polynucleotide sequence in which the 3′ 10 polynucleotides of one of the sequences delineated in column 6 of Table 1B and the 5′ 10 polynucleotides of a fragment or variant of the sequence of SEQ ID NO: X are directly contiguous Nucleic acids which hybridize to the complement of these 20 contiguous polynucleotides under stringent hybridization conditions or alternatively, under lower stringency conditions, are also encompassed by the invention. Polypeptides encoded by these polynucleotides and/or nucleic acids, other polynucleotides and/or nucleic acids encoding these polypeptides, and antibodies that bind these polypeptides are also encompassed by the invention. Additionally, fragments and variants of the above-described polynucleotides, nucleic acids, and polypeptides are also encompassed by the invention.

[0100] In specific embodiments, polynucleotides of the invention comprise, or alternatively consist of, a polynucleotide sequence in which the 3′ 10 polynucleotides of the sequence of SEQ ID NO: X and the 5′ 10 polynucleotides of the sequence of one of the sequences delineated in column 6 of Table 1B are directly contiguous. Nucleic acids which hybridize to the complement of these 20 contiguous polynucleotides under stringent hybridization conditions or alternatively, under lower stringency conditions, are also encompassed by the invention. Polypeptides encoded by these polynucleotides and/or nucleic acids, other polynucleotides and/or nucleic acids encoding these polypeptides, and antibodies that bind these polypeptides are also encompassed by the invention. Additionally, fragments and variants of the above-described polynucleotides, nucleic acids, and polypeptides are also encompassed by the invention.

[0101] In specific embodiments, polynucleotides of the invention comprise, or alternatively consist of, a polynucleotide sequence in which the 3′ 10 polynucleotides of a fragment or variant of the sequence of SEQ ID NO: X and the 5′ 10 polynucleotides of the sequence of one of the sequences delineated in column 6 of Table 1B are directly contiguous. Nucleic acids which hybridize to the complement of these 20 contiguous polynucleotides under stringent hybridization conditions or alternatively, under lower stringency conditions, are also encompassed by the invention. Polypeptides encoded by these polynucleotides and/or nucleic acids, other polynucleotides and/or nucleic acids encoding these polypeptides, and antibodies that bind these polypeptides are also encompassed by the invention. Additionally, fragments and variants of the above-described polynucleotides, nucleic acids, and polypeptides, are also encompassed by the invention.

[0102] In further specific embodiments, polynucleotides of the invention comprise, or alternatively consist of, a polynucleotide sequence in which the 3′ 10 polynucleotides of one of the sequences delineated in column 6 of Table 1B and the 5′ 10 polynucleotides of another sequence in column 6 are directly contiguous. Nucleic acids which hybridize to the complement of these 20 contiguous polynucleotides under stringent hybridization conditions or alternatively, under lower stringency conditions, are also encompassed by the invention. Polypeptides encoded by these polynucleotides and/or nucleic acids, other polynucleotides and/or nucleic acids encoding these polypeptides, and antibodies that bind these polypeptides are also encompassed by the invention. Additionally, fragments and variants of the above-described polynucleotides, nucleic acids, and polypeptides are also encompassed by the invention.

[0103] In specific embodiments, polynucleotides of the invention comprise, or alternatively consist of, a polynucleotide sequence in which the 3′ 10 polynucleotides of one of the sequences delineated in column 6 of Table 1B and the 5′ 10 polynucleotides of another sequence in column 6 corresponding to the same Clone ID NO: Z (see Table 1B, column 1) are directly contiguous. Nucleic acids which hybridize to the complement of these 20 lower stringency conditions, are also encompassed by the invention. Polypeptides encoded by these polynucleotides and/or nucleic acids, other polynucleotides and/or nucleic acids encoding these polypeptides, and antibodies that bind these polypeptides are also encompassed by the invention. Additionally, fragments and variants of the above-described polynucleotides, nucleic acids, and polypeptides are also encompassed by the invention.

[0104] In specific embodiments, polynucleotides of the invention comprise, or alternatively consist of, a polynucleotide sequence in which the 3′ 10 polynucleotides of one sequence in column 6 corresponding to the same contig sequence identifer SEQ ID NO: X (see Table 1B, column 2) are directly contiguous. Nucleic acids which hybridize to the complement of these 20 contiguous polynucleotides under stringent hybridization conditions or alternatively, under lower stringency conditions, are also encompassed by the invention. Polypeptides encoded by these polynucleotides and/or nucleic acids, other polynucleotides and/or nucleic acids encoding these polypeptides, and antibodies that bind these polypeptides are also encompassed by the invention. Additionally, fragments and variants of the above-described polynucleotides, nucleic acids, and polypeptides are also encompassed by the invention.

[0105] In specific embodiments, polynucleotides of the invention comprise, or alternatively consist of a polynucleotide sequence in which the 3′ 10 polynucleotides of one of the sequences delineated in column 6 of Table 1B and the 5′ 10 polynucleotides of another sequence in column 6 corresponding to the same row are directly contiguous. In preferred embodiments, the 3′ 10 polynucleotides of one of the sequences delineated in column 6 of Table 1B is directly contiguous with the 5′ 10 polynucleotides of the next sequential exon delineated in Table 1B, column 6. Nucleic acids which hybridize to the complement of these 20 contiguous polynucleotides under stringent hybridization conditions or alternatively, under lower stringency conditions, are also encompassed by the invention. Polypeptides encoded by these polynucleotides and/or nucleic acids, other polynucleotides and/or nucleic acids encoding these polypeptides, and antibodies that bind these polypeptides are also encompassed by the invention. Additionally, fragments and variants of the above-described polynucleotides, nucleic acids, and polypeptides are also encompassed by the invention.

[0106] Many polynucleotide sequences, such as EST sequences, are publicly available and accessible through sequence databases and may have been publicly available prior to conception of the present invention. Preferably, such related polynucleotides are specifically excluded from the scope of the present invention. Accordingly, for each contig sequence (SEQ ID NO: X) listed in the third column of Table 1A, preferably excluded are one or more polynucleotides comprising a nucleotide sequence described by the general formula of a−b, where a is any integer between 1 and the final nucleotide minus 15 of SEQ ID NO: X, b is an integer of 15 to the final nucleotide of SEQ ID NO: X, where both a and b correspond to the positions of nucleotide residues shown in SEQ ID NO: X, and where b is greater than or equal to a+14. More specifically, preferably excluded are one or more polynucleotides comprising a nucleotide sequence described by the general formula of a−b, where a and b are integers as defined in columns 4 and 5, respectively, of Table 3. In specific embodiments, the polynucleotides of the invention do not consist of at least one, two, three, four, five, ten, or more of the specific polynucleotide sequences referenced by the Genbank Accession No. as disclosed in column 6 of Table 3 (including for example, published sequence in connection with a particular BAC clone). In further embodiments, preferably excluded from the invention are the specific polynucleotide sequence(s) contained in the clones corresponding to at least one, two, three, four, five, ten, or more of the available material having the accession numbers identified in the sixth column of this Table (including for example, the actual sequence contained in an identified BAC clone). In no way is this listing meant to encompass all of the sequences which may be excluded by the general formula, it is just a representative example. All references available through these accessions are hereby incorporated by reference in their entirety.

TABLE 3

| Clone ID | SEQ ID | Contig | EST Disclaimer | | |
|---|---|---|---|---|---|
| NO: Z | NO: X | ID: | Range of a | Range of b | Accession #'s |
| H7MBA84 | 11 | 625386 | 1-212 | 15-226 | |
| H7MBC38 | 12 | 705707 | 1-121 | 15-135 | AL035088. |
| H7MBD34 | 13 | 928552 | 1-60 | 15-74 | |
| HBAFB96 | 14 | 573392 | 1-332 | 15-346 | AC004049. |
| HBAGJ74 | 15 | 945133 | 1-401 | 15-415 | |
| HBAGK69 | 16 | 881903 | 1-521 | 15-535 | Z28716, AA092179, and C04832. |
| HBAGU08 | 17 | 959191 | 1-363 | 15-377 | AL134524, AL045328, AL047163, AL038838, AL037343, AL037436, |
| | | | | | AL038983, AL037335, AI142134, AL037323, AL044125, AL040193, |
| | | | | | AL037443, AL042898, AL037727, AL038532, AL044162, AL041347, |
| | | | | | AL040621, AL043538, AL043496, AL041324, AL038822, AL047012, |
| | | | | | AL041098, AL037435, AL038761, AL041246, AL041238, AL040464, |
| | | | | | AL044186, AL040463, AL040617, AL043923, AL047170, AL043814, |
| | | | | | AL044037, AL043845, AL047219, AL040625, AL041635, AL040294, |
| | | | | | AL040075, AL045684, AL041296, AL040576, AL044064, AL041752, |
| | | | | | AL041459, AL041577, AL134110, AL045753, AL040510, AL043467, |
| | | | | | AL047183, AL041086, AL043677, AL040839, AL046850, AL043492, |
| | | | | | AL041602, AL040052, AL040444, AL040768, AL044074, AL046994, |
| | | | | | AL041730, AL041523, AL043627, AL046914, AL041374, AL040472, |
| | | | | | AL043848, AL041163, AL043570, AL041133, AL042135, AL046442, |
| | | | | | AL041096, AL040322, AL041955, AL037295, AL041233, AL040119, |
| | | | | | AL045671, AL039316, AL040149, AL046392, AL039360, AL079852, |
| | | | | | AL044272, AL039643, AL041168, AL044258, AL041159, AL041358, |
| | | | | | AL047057, AL042096, AL045920, AL040148, AL041346, AL049018, |
| | | | | | AL041292, AL040458, AL044187, AL044199, AL041142, AL045990, |
| | | | | | AL040332, AL040571, AL041197, AL040529, AL046330, AL039338, |
| | | | | | AL079878, AL040745, AL040370, AI547295, AL040128, AL044274, |
| | | | | | AL047036, AL037341, AL045327, AL041277, AL040342, AL040553, |
| | | | | | AL041186, AL039744, AL040414, AL040155, AL040285, AL047037, |
| | | | | | AL040091, AL045989, AL044165, AL041131, AL040090, AL041051, |
| | | | | | AL046327, AL038745, AL040168, AL043775, AL043444, AL045817, |
| | | | | | AL040253, AL041227, AL040082, AL045857, AL040329, AL039432, |
| | | | | | AL041278, AL043941, AL040238, AL040263, AL037279, AL040255, |
| | | | | | AL044201, AL038651, D29033, AL048677, AL038878, AI547291, |
| | | | | | AI318479, AL079977, AA585098, AL045725, AL041344, AL039915, |
| | | | | | AI547039, AL043612, AI546971, U46344, AL045211, AI541383, |
| | | | | | AL044529, AI526113, AL038024, AL135012, AL048714, AL047340, |
| | | | | | T19407, AI541524, AL048657, AL049069, AI541527, T18597, AL045494, |
| | | | | | C06219, AI557039, AA585439, AL042523, AI525500, AI557864, |
| | | | | | AI541356, AI540920, AI557084, AI541205, AL042420, D59436, R28895, |
| | | | | | AI541346, AA283326, AL042468, T10982, AL038040, AI547250, |
| | | | | | AI557262, AI526186, D60844, R29262, AI526078, C16293, AW363350, |
| | | | | | R28892, AA585325, AL038041, AR064707, AJ238010, AR066494, A93923, |
| | | | | | D17247, A93916, U94592, A93931, A22739, A85203, Y16359, AL133053, |
| | | | | | AI6035, AL122101, AR023813, Z32836, AL133074, AR054723, AF082186, |
| | | | | | I05558, D50010, D13509, AJ244003, AJ244004, AJ244005, X81969, |
| | | | | | A98767, A20702, A93963, A93964, AR062872, I63120, AR062871, |
| | | | | | AR017907, A43189, AR062873, A43188, A20700, A25909, A98420, |
| | | | | | A98423, A98432, A98436, A98417, A98427, D78345, E03627, I48927, |
| | | | | | E17098, I06859, AI8050, A23334, A75888, I70384, A60111, A23633, |
| | | | | | AR007512, AL133049, AR038855, and A81878. |
| HBAMC12 | 18 | 968816 | 1-375 | 15-389 | |
| HBAMC47 | 19 | 854049 | 1-545 | 15-559 | AP000523. |
| HBAMC68 | 20 | 849402 | 1-390 | 15-404 | |
| HBAMC92 | 21 | 572947 | 1-435 | 15-449 | |
| HCKAA13 | 22 | 534965 | 1-370 | 15-384 | |
| HCKAA41 | 23 | 694397 | 1-352 | 15-366 | |
| HFKCJ86 | 24 | 504445 | 1-326 | 15-340 | AA341129, and AA341247. |
| HFKEA55 | 25 | 530256 | 1-341 | 15-355 | AA741056. |
| HFKEA65 | 26 | 932094 | 1-639 | 15-653 | AC002366. |
| HFKEH40 | 27 | 523591 | 1-253 | 15-267 | |
| HFKEJ40 | 28 | 909830 | 1-309 | 15-323 | AA351412, AW369782, AI968585, R13131, R71556, H59671, AA732740, |
| | | | | | R35566, and AB018325. |
| HFKEJ77 | 29 | 529919 | 1-233 | 15-247 | |
| HFKEM26 | 30 | 573949 | 1-170 | 15-184 | AC004982. |
| HFKEM70 | 31 | 963178 | 1-313 | 15-327 | |
| HFKEN74 | 32 | 974309 | 1-626 | 15-640 | AW023938, AI554747, AA459899, AA074393, AL022330, AL009174, |
| | | | | | AC002073, AC005777, AC004143, AC004447, AC006013, AP000501, |
| | | | | | AC000054, AC005527, AC004032, AC004918, AC004893, AC005529, |
| | | | | | AJ003147, AC005005, AC004231, and AL096794. |
| HFKER27 | 33 | 926744 | 1-290 | 15-304 | |
| HFKER69 | 34 | 918290 | 1-490 | 15-504 | |
| HFKEU09 | 35 | 855045 | 1-441 | 15-455 | |
| HFKEW23 | 36 | 854952 | 1-713 | 15-727 | AI821974, and AA873801. |
| HFKFB18 | 37 | 935988 | 1-506 | 15-520 | |
| HFKFB23 | 38 | 675175 | 1-410 | 15-424 | H29841. |
| HFKFB42 | 39 | 522037 | 1-374 | 15-388 | AL109839. |
| HFKFE05 | 40 | 932306 | 1-309 | 15-323 | W86926, AL049775, AC004741, AC008163, AL031734, and AL031274. |
| HFKFE23 | 41 | 881475 | 1-600 | 15-614 | AW247495, AA187097, AA172364, AI815484, AA169457, and AA148993. |
| HFKFE59 | 42 | 854991 | 1-546 | 15-560 | |
| HFKFI14 | 43 | 670322 | 1-512 | 15-526 | AI635635, AW029406, AW301134, AI439214, AI222373, AI160043, |
| | | | | | AI936133, AA604994, AI088166, AI620579, AI807864, AW087927, |
| | | | | | F18815, AI933350, AA971094, AA679494, F19202, C00780, AA516052, |
| | | | | | F35328, AI422053, AI378846, AI422054, AI467881, AA505330, AI160683, |
| | | | | | AI382047, AA747782, AI382048, AA838645, AI685868, AI089313, |
| | | | | | AI200403, AI222097, AA836800, AA233797, AI565857, F26915, |
| | | | | | AI367842, AI651466, AA114906, AA902486, AA302447, R14860, F16986, |
| | | | | | AA931620, F28409, AI744468, N64170, W22033, Z25239, C17445, F27592, |
| | | | | | AI672619, F17310, AW316769, AA838451, T57851, R11362, AA233828, |
| | | | | | T81626, AI541422, AI085169, AI364052, AA114905, AI003676, |
| | | | | | AA903573, F18512, R10508, AA352749, AF047437, and AC004771. |
| HFKFI22 | 44 | 930982 | 1-318 | 15-332 | |
| HFKFI44 | 45 | 929786 | 1-298 | 15-312 | AI366196, AA224540, and D38548. |
| HFKFJ12 | 46 | 582587 | 1-355 | 15-369 | |
| HFKFJ14 | 47 | 787260 | 1-332 | 15-346 | Z68324. |
| HFKFJ25 | 48 | 963144 | 1-671 | 15-685 | T26651, AI860719, Z43590, F06052, and AC004017. |
| HFKFN66 | 49 | 511046 | 1-570 | 15-584 | AA662296, T90222, and T83027. |
| HFKFO75 | 50 | 573840 | 1-323 | 15-337 | |
| HFKFQ24 | 51 | 530222 | 1-172 | 15-186 | AL136295. |
| HFKGA94 | 52 | 855099 | 1-309 | 15-323 | AA368329, AA825954, R39295, T12047, AA831913, AI919048, |
| | | | | | AA362440, AA557945, AA012987, AI732911, AA362439, R33091, |
| | | | | | AA640305, AA731008, AA350081, AA569206, AA385094, AA809787, |
| | | | | | AI002863, AA558377, AA219166, AI279693, AI049630, R79396, |
| | | | | | AI668566, AW028376, AW268090, AA360139, AA832104, T54173, |
| | | | | | AI003474, AA367672, AA598497, AA364082, AA219651, R64110, |
| | | | | | AA310557, AA668421, AA658320, AA368659, R92703, AI884404, |
| | | | | | AI281622, AI567676, AW022796, AI003068, H86399, AA047842, |
| | | | | | AW407007, AA601336, AC005089, AL023575, AL035405, AC005839, |
| | | | | | AC003109, AL008726, AF108083, AC006088, AL109798, AC004477, |
| | | | | | AC004253, AC007993, AL080317, AC008372, Z83843, AL009181, |
| | | | | | AL132712, U91326, Z98036, Z98884, AC004974, AL049569, AC002544, |
| | | | | | AC007546, AC002073, AL049869, AF196779, AC005409, AC000039, |
| | | | | | AL022323, AC006441, AC007226, AC004686, Z99716, AC006257, |
| | | | | | AC007298, AC005486, AL022393, AL035443, AL121658, AC006578, |
| | | | | | AC006536, AF196972, AL034379, U91322, U95742, AF111168, |
| | | | | | AC004895, AC006023, AL121603, AP000355, AC005920, AL049830, |
| | | | | | AC004815, AL035696, AC005003, AB001523, AL022326, AL049844, |
| | | | | | AC004033, AL031666, AP000493, AC007263, AC005231, AC004263, |
| | | | | | AL133448, AC002463, AL035587, AF015416, AL031591, AC005180, |
| | | | | | AC004912, AL049757, AC006449, AC004913, AC005696, AF205588, |
| | | | | | AC005746, AP001053, Z83826, AC004837, AC005225, AC008044, |
| | | | | | AL080243, AL133246, AP000500, AC004832, AC004821, AC005519, |
| | | | | | AC005539, AC007308, AC004841, AC006121, AL034429, AP000354, |
| | | | | | AC002470, AC004079, L44140, Z93023, AC007934, Z93020, Z95116, |
| | | | | | AC005057, AL033527, Z93017, AL121769, AC004887, AP000692, |
| | | | | | AC005624, AC004668, AC004765, AF196969, AC005520, AFI21781, |
| | | | | | AC005102, AL121653, AF107885, AL035086, AC007023, Z83844, |
| | | | | | AC002040, AC005859, AC004602, AC005940, AL031295, AC007225, |
| | | | | | AC003007, AL031291, AL049760, AC002310, U73630, AL020993, |
| | | | | | AL109952, AC005291, Z94056, AC010209, AJ003147, AP000114, |
| | | | | | AP000046, AC006236, AL034423, AC004000, AC002511, AC004687, |
| | | | | | AC002107, AC005725, AC004491, AL020997, AL133245, AC006241, |
| | | | | | AC007666, AL049843, AP000359, AC002350, U96629, AC007421, |
| | | | | | AC009516, AC006064, U52111, AC004970, AC005800, AC006001, |
| | | | | | AL035659, AL021154, AC004894, AC008069, AC002553, AC006111, |
| | | | | | AC002306, AC005944, AJ239318, AL109963, Z85996, AC005514, |
| | | | | | AL109759, AC000134, AC006071, AC002565, AC005531, AC007766, |
| | | | | | Z97054, AF050154, AC005895, AC004257, AL049694, AC002477, |
| | | | | | AC007358, AL117258, AC007052, AC004150, AC004859, AC004929, |
| | | | | | AC005071, and AL109627. |
| HFKGC14 | 53 | 573785 | 1-245 | 15-259 | |
| HFKGD10 | 54 | 968172 | 1-452 | 15-466 | AA774921. |
| HFKGD48 | 55 | 954952 | 1-384 | 15-398 | |
| HFKHB46 | 56 | 965767 | 1-406 | 15-420 | N40788, N94129, AL035405, AB015329, and AB028949. |
| HFKHB67 | 57 | 965847 | 1-622 | 15-636 | AI363493, AW071799, AI828530, AI858641, AI565804, AW005098, |
| | | | | | AI826054, AI499730, AI949049, AI373508, AW243539, AI589687, |
| | | | | | AI859191, AI885149, AI869624, AI933285, AW026755, AI950294, |
| | | | | | AA548687, AA550893, AI480068, and AJ236623. |
| HFKHB84 | 58 | 854902 | 1-202 | 15-216 | |
| HFKHD35 | 59 | 854887 | 1-596 | 15-610 | AI401095. |
| HFKHD38 | 60 | 854861 | 1-491 | 15-505 | AA917529, and AI290232. |
| HFKHE67 | 61 | 881093 | 1-399 | 15-413 | AL041748, AA282295, H83772, AA262182, AW206483, W37970, |
| | | | | | AI660249, AW365844, AA442059, AL121242, AA455718, AA534588, |
| | | | | | AL040142, and AL117662. |
| HFKHF54 | 62 | 855118 | 1-513 | 15-527 | |
| HFKHG06 | 63 | 965906 | 1-339 | 15-353 | AA631941, AA436930, AI424442, AW161498, AW250779, AW163044, |
| | | | | | AA041408, AA056752, AA044406, AA454563, R48332, AA258235, |
| | | | | | AI129362, H45477, AI694307, AA905034, AA429473, AI421826, |
| | | | | | AI377349, AW156992, AI087169, AI193858, AW025506, AI355265, |
| | | | | | AI682330, AI193077, W81387, AA978265, AA369310, AA628812, |
| | | | | | AI826085, AA127040, AA917602, AA913533, AI568969, AW157076, |
| | | | | | AI310416, AA769689, AA913096, AI929761, AI741886, AA369311, |
| | | | | | AA496016, AA640738, AA635317, AA542886, AW190530, AI149098, |
| | | | | | AA972224, AI338612, AI480213, AW058014, AW328289, AW204399, |
| | | | | | AI685684, F31697, AW328288, AI468074, R48441, W79715, F32457, |
| | | | | | AA610691, AA196235, AW405036, F18177, F36944, F36941, AI721278, |
| | | | | | R09319, AA610446, AW246920, AA310193, F31667, AA041506, F34442, |
| | | | | | AA456455, F37799, AA125762, AA058430, AW450353, and AC004643. |
| HFKHH68 | 64 | 961433 | 1-531 | 15-545 | AA374854, AW135564, AI271848, AI762632, and Z82195. |
| HFKHR74 | 65 | 953800 | 1-514 | 15-528 | AW299437, AI640149, AA348101, AW135484, Z42797, R35430, |
| | | | | | AI636408, AW269210, AI271987, AA922757, AI765884, and AL008733. |
| HFKHZ39 | 66 | 928269 | 1-708 | 15-722 | AA416704, and AA416608. |
| HFKID43 | 67 | 854988 | 1-527 | 15-541 | |
| HFKID48 | 68 | 879771 | 1-402 | 15-416 | AI269245, AW451368, and AI424466. |
| HFKIF01 | 69 | 914971 | 1-389 | 15-403 | |
| HFKIF60 | 70 | 914948 | 1-418 | 15-432 | |
| HFKIH06 | 71 | 934051 | 1-546 | 15-560 | Z43354, H84549, F05371, AA852957, AW161586, R82800, and AL021878. |
| HFKII05 | 72 | 930948 | 1-400 | 15-414 | |
| HFKII11 | 73 | 965846 | 1-430 | 15-444 | |
| HFKIP07 | 74 | 924825 | 1-337 | 15-351 | |
| HFKIP11 | 75 | 965072 | 1-434 | 15-448 | W88721, R11591, T08135, AA736429, and AI479791. |
| HFKIR40 | 76 | 883093 | 1-498 | 15-512 | AA022743, H46779, H46081, W07846, AI751420, AA334026, N46299, |
| | | | | | N77316, AA384525, N35279, AW378996, and AF009750. |
| HFKIS93 | 77 | 854862 | 1-208 | 15-222 | AL050318. |
| HFKIV55 | 78 | 922739 | 1-408 | 15-422 | |
| HFKIW31 | 79 | 918243 | 1-412 | 15-426 | AB022696, AB033108, AJ007627, AF109143, and AB022697. |
| HFKIX76 | 80 | 854993 | 1-159 | 15-173 | |
| HFKJE03 | 81 | 959898 | 1-445 | 15-459 | |
| HFKJK90 | 82 | 926511 | 1-598 | 15-612 | |
| HFKJL17 | 83 | 854829 | 1-231 | 15-245 | |
| HFKJL36 | 84 | 930422 | 1-400 | 15-414 | AL046409, AA469451, AW069227, AW301350, AW303196, AW274349, |
| | | | | | AI634187, AW328331, AW089016, AI350211, AI457313, AW167330, |
| | | | | | AI926033, AW193265, AI431303, AW151247, AL041706, AI687343, |
| | | | | | AW157005, AW193432, AI281881, AA341865, AI341548, AW438643, |
| | | | | | AI281561, AW340905, AI375710, AI189932, AA992126, AI754257, |
| | | | | | AI028510, AL041381, AI679045, AA524616, AW265385, AW276827, |
| | | | | | AA477503, AW407632, AW407578, AI688846, AI244157, AA551503, |
| | | | | | AA169245, AI619997, AI312309, AA225273, AL042420, AI457397, |
| | | | | | AI583466, T06828, AI251576, AA297666, AI824562, AW327624, |
| | | | | | AI669589, AL047553, AW380335, AI744995, AA523843, AW023111, |
| | | | | | AI374809, AA350859, AI798489, AA904211, AI341664, AA857812, |
| | | | | | AI306232, AA501614, AW268322, AI830390, AA666295, AW168846, |
| | | | | | AA219098, AA578832, AA618035, AA177061, AW238341, W60522, |
| | | | | | AI801600, AW301771, F33121, AI598003, T74524, AA129746, AL079869, |
| | | | | | AI054418, AI866908, AI733856, AI598060, AI471455, AI282661, |
| | | | | | AW026305, AI421950, AI419337, AA130647, AA548610, AA701131, |
| | | | | | AI859438, AL138265, AI791659, H73550, AI922224, AI282310, |
| | | | | | AW162288, AI989408, AI624024, AL031588, AL117328, AC004895, |
| | | | | | AP000099, AL049569, AP000036, AC005071, AL023284, AL049776, |
| | | | | | AL049869, AF207550, AL133245, AC005015, AL034420, AC000025, |
| | | | | | AC005952, AC005527, AC007406, AL049780, AC005081, AL031258, |
| | | | | | AC007055, AC005529, U18394, AC006530, AL033504, X53550, U18391, |
| | | | | | X55925, AL133163, Z95114, AC002312, Z93241, AC006480, AC005488, |
| | | | | | Z84469, U18392, AL096791, AC016025, AL035659, U18393, U57009, |
| | | | | | AL096768, U18398, U18395, I51997, AL133246, X55448, U18387, |
| | | | | | AC004812, AP000493, AC006236, U18399, U57006, AL117330, |
| | | | | | AC006088, AP000557, AC002310, AC007199, AC006115, AL030996, |
| | | | | | AP000152, AC005562, AL008631, AL050341, Z94802, AC005726, |
| | | | | | AC005231, AC004638, U78027, AC005921, X55931, AL022316, Z95152, |
| | | | | | AL022345, AC005911, AL121603, AC006305, AC007216, AC002404, |
| | | | | | AC007686, AL031680, AL109847, AC005821, X55926, X54175, |
| | | | | | AL031577, AC009516, AC004134, X55924, Z49918, AC007065, |
| | | | | | AC006139, L44140, AC005102, U57008, AC004985, AC006277, U18396, |
| | | | | | U95742, AC005332, AC005086, AL049540, I34294, U18390, AC002477, |
| | | | | | AC006312, AF196779, AF030453, AC002369, X54179, AC005484, |
| | | | | | AP000555, AC005722, AL031666, U47924, X54178, AL031584, AF024533, |
| | | | | | AC005274, AL034549, AF001548, AC005300, AF088219, AC004832, |
| | | | | | AF045555, AC007298, X54181, AL121655, AC009509, AP000514, |
| | | | | | AC005089, AL109801, AL109839, AC003665, AL096701, AC005004, |
| | | | | | Z81364, AF015147, AL033392, Z68869, X55932, AC006449, AC004859, |
| | | | | | AC004878, U67801, AC006211, AC009247, AC007880, AC005180, |
| | | | | | AC006511, U95739, AL035695, AL049759, AC007845, AC006241, |
| | | | | | AL031681, AC005765, D87675, AL035422, AL035086, AC005088, |
| | | | | | AL133448, AC004890, AC005412, AL024507, AC002072, AL020997, |
| | | | | | AC002400, U82828, X55923, AC016026, AC003080, AC002546, |
| | | | | | AC004263, Z83840, AC005183, U62317, AC008044, AC004707, |
| | | | | | AL009051, AC002301, AC006996, Z99128, AL023575, AL023807, |
| | | | | | AC007899, AC005695, AL049709, AP000116, AP000049, AP000113, |
| | | | | | AP000045, AC007371, U95740, AC004408, AC005531, AP000501, |
| | | | | | AC005602, AC005996, AC004019, AC006057, AC006062, U80017, |
| | | | | | AL078593, AL033527, AC004884, AC006077, L24093, AC002470, |
| | | | | | AL031277, AC006578, Z98742, AF109907, X55927, AC004000, |
| | | | | | AC004084, AC007785, AB014079, AP000311, AF129756, AC006130, |
| | | | | | AC003684, AF130343, AF205588, AL050318, AL033521, AC000052, |
| | | | | | AL024498, AC005200, U62293, AC003663, AC007688, AC004230, |
| | | | | | AC005924, AP000313, AL135744, AC005288, Z84480, and AC006019. |
| HFKJP08 | 85 | 918312 | 1-303 | 15-317 | |
| HFKJW29 | 86 | 932310 | 1-337 | 15-351 | |
| HFKKG09 | 87 | 854888 | 1-626 | 15-640 | |
| HFKKM02 | 88 | 918260 | 1-124 | 15-138 | |
| HFKKM61 | 89 | 855082 | 1-520 | 15-534 | |
| HFKKQ02 | 90 | 918270 | 1-345 | 15-359 | AI972194, and AL137434 |
| HFKKR11 | 91 | 965858 | 1-428 | 15-442 | |
| HFKKS48 | 92 | 854927 | 1-529 | 15-543 | |
| HFKKU68 | 93 | 854913 | 1-521 | 15-535 | AA579342, AA578995, AA846923, AI493583, AA441810, AA502207, |
| | | | | | AI251576, AI279417, AA904275, AA225273, AI306232, AW302017, |
| | | | | | AA584484, AW274191, AA831903, AA721998, AA856815, W23546, |
| | | | | | N86471, AI051037, AA358409, AA489856, AA846046, AA368155, |
| | | | | | AW302048, C14698, AI640411, AA536040, T06598, AI445883, AA501614, |
| | | | | | AA493808, AI278972, AI027056, AI742168, AA642053, AA070614, |
| | | | | | AA847508, AA570588, AI354333, H71678, AA612727, AW161016, |
| | | | | | AA713769, M78021, AA481887, AA613761, R56485, AA845804, |
| | | | | | AA598605, AA847427, AA457685, AI891070, AI796594, H28709, |
| | | | | | AL037910, AI280535, AW073510, T84117, AI560191, AA302661, |
| | | | | | AA350644, AA436140, AA548692, AI049924, AI761120, AI798041, |
| | | | | | AI004591, AL041375, AA570441, AI801540, AA429942, AA610433, |
| | | | | | AW274078, AI356440, AW150209, AI732807, AI744306, AI453155, |
| | | | | | AA857381, AI433104, AA303054, AA018588, AA584654, AA552989, |
| | | | | | AA708305, AI962030, AW089625, AA342238, AA215470, AI537020, |
| | | | | | AI053518, AI689019, AA486896, AA651639, AL047349, AI754653, |
| | | | | | AA632765, AL031311, Z99128, AL132987, AC016830, AJ010770, |
| | | | | | AC004491, AC002381, AC005291, AC005756, L78810, Z83844, AP000557, |
| | | | | | AL133382, AJ003147, U47924, AP000692, AC005921, AL022316, |
| | | | | | AC008101, AC006023, AL035249, AL096791, AC004796, AL121652, |
| | | | | | AC007312, AC016027, AC002312, AC009516, AL109758, AC007227, |
| | | | | | AC005057, AC007283, AC007919, U95742, AF108083, AC005527, |
| | | | | | AC004859, AP000967, AP000065, AL033392, AF053356, AC006312, |
| | | | | | AC005747, AC007934, AC005874, AF134471, AP000552, AL031282, |
| | | | | | AC002365, AC004013, AC007041, AC004967, AC005280, AD000092, |
| | | | | | AC005914, AL050318, AP000030, AC005212, AB022785, AF196969, |
| | | | | | AC005529, AC006511, AC004253, AL049759, AL020997, AC005288, |
| | | | | | AC006449, AC007314, AC006262, AC005531, AC006130, AL035072, |
| | | | | | AC007216, AL022163, AL121658, AC005399, AL109984, Z85986, |
| | | | | | AF217403, AL031589, AC004821, AC005480, AL121754, AL031289, |
| | | | | | AL133448, AL024498, AL022476, AC004408, AC005839, AC005015, |
| | | | | | AL031255, AC004382, AL031584, AC002351, AC006277, AP000502, |
| | | | | | AC005486, AC002115, AC006530, AC008372, AL109798, AC007541, |
| | | | | | AC004526, AC007686, AC005730, AC002477, AC005837, AC006271, |
| | | | | | AD000812, AF196779, AP000512, AC005971, AL117344, AC003957, |
| | | | | | AC004883, AL121769, AC005081, AL139054, AC005821, AF111169, |
| | | | | | Z98304, AC003085, AC006160, AL031729, AC005244, AC004106, |
| | | | | | AF003626, AF134726, AC004520, AP000503, AC005011, AL117258, |
| | | | | | AC004637, AL008627, AC006064, AC005684, AL031591, AL121603, |
| | | | | | AF200465, AC002301, AL031120, AC007486, AL021918, AC004701, |
| | | | | | AC003684, AC004228, AL022336, AC005261, AC006965, AL049830, |
| | | | | | AC004150, AC005300, AC005800, AC004812, AL035458, AC005066, |
| | | | | | AL034420, AC004973, AC002316, AC002126, AC003950, AC007546, |
| | | | | | AC004848, AC004815, AC012384, AC005940, AL031733, AL049776, |
| | | | | | Z84487, AC006057, AL031673, AC005512, AC007051, AL035683, |
| | | | | | AP000049, AC006211, Z95152, AL023575, AL109827, U07562, AC006430, |
| | | | | | AC006317, Z84466, Y10196, AP000355, Z98941, AC005520, AC004079, |
| | | | | | AC005484, U80017, U91318, U85195, Z97629, AC005225, AL133245, |
| | | | | | AC003007, AP000113, AC005620, AC005231, AP000350, AC004552, |
| | | | | | AL050348, AP000311, AP000208, AP000130, AP000031, AP000558, |
| | | | | | AL021546, AP000509, AC005325, AC004020, AL031346, AC002400, |
| | | | | | AL035659, AC007371, AC002430, AC007384, AC005736, AF038458, |
| | | | | | AF109907, AF124523, AP000555, AL031281, AC004217, AC005358, |
| | | | | | AC008018, AL121653, AL049869, AC000159, AC004638, AB029343, |
| | | | | | AC005086, AC009247, AC005411, L78833, AL133163, AL031848, |
| | | | | | AC016025, AC003665, U52112, AC005920, AE000658, AP000517, |
| | | | | | AL031284, AL035587, AC008044, AC004854, AL049872, and AC005523. |
| HFKLD11 | 94 | 965830 | 1-693 | 15-707 | H19388, H12126, D58283, D80024, C14389, D59275, D80043, D80195, |
| | | | | | D50979, D80227, D59502, D80164, D59467, D59859, D80022, D80166, |
| | | | | | D81030, D51423, D59619, D80210, D51799, D80391, C15076, D80240, |
| | | | | | D80253, D59787, C14331, D80269, D80038, D80188, D80212, D80193, |
| | | | | | D80196, D80219, D57483, D59927, D80378, D80366, D59889, D50995, |
| | | | | | D51060, AA305409, D59610, D80045, C14429, D80241, AA305578, |
| | | | | | T03269, C14014, AW178893, C75259, D52291, D51022, AW179328, |
| | | | | | AW177440, D81026, AW378532, D80134, AW178775, AA514188, |
| | | | | | D80248, D51250, AW369651, D80268, F13647, D80251, D80522, |
| | | | | | AW178762, D59695, AI910186, AW177501, AW177511, AW352158, |
| | | | | | AA514186, D80133, AW360811, D58253, D80168, D81111, C14227, |
| | | | | | C05695, AI905856, AW375405, C14298, AW352117, AW377671, C14407, |
| | | | | | D80064, AW176467, Z21582, D80132, D80247, AW366296, AW360844, |
| | | | | | AW360817, AW375406, AW378534, AW179332, AW377672, AW179023, |
| | | | | | AW178905, D80302, AW378540, AW360834, AW352171, D80439, |
| | | | | | AW377676, AW178906, AW352170, AW177731, AW178907, AW179019, |
| | | | | | AW179024, D59373, AW177505, AW179020, AW360841, AW178909, |
| | | | | | AW177456, AW179329, AW178980, AW177733, AW378528, AA285331, |
| | | | | | AW178908, AW178754, AW179018, AW352174, D51103, D51097, |
| | | | | | T11417, AI557751, AW179004, AW179012, AW178914, AW378525, |
| | | | | | AW367967, D80157, AW177722, AW177728, D51759, AW179220, |
| | | | | | AW179009, AW178774, AW178911, AW378543, AW352163, D58246, |
| | | | | | D59503, AW178983, AW352120, C06015, AW178781, T48593, D59627, |
| | | | | | D58101, AI535850, D80014, AW177508, AW177723, D59653, D80258, |
| | | | | | AA809122, D45260, C14975, AW378533, AI525923, AI557774, |
| | | | | | AW367950, AW177497, D59317, H67854, C03092, H67866, D51213, |
| | | | | | D59474, AW177734, AW178986, T03116, D45273, AI535686, AI525917, |
| | | | | | T02974, C14973, C14344, AI525227, D51221, D59551, C14957, D60010, |
| | | | | | AI525920, AA514184, D60214, AI525912, C14046, T03048, AI525222, |
| | | | | | AI525242, AI535961, AI525235, AI525925, AW378542, D31458, N66429, |
| | | | | | AW378539, AI525215, C16955, C05763, Z33452, AI525237, Z30160, |
| | | | | | AB002349, AJ132110, A84916, A62300, AR018138, A62298, AB028859, |
| | | | | | X67155, Y17188, D26022, A25909, AF058696, A67220, D89785, A78862, |
| | | | | | D34614, AR008278, D88547, I82448, X82626, AR025207, Y12724, |
| | | | | | A82595, AR016808, AB002449, AR060385, A94995, AB012117, |
| | | | | | AR008443, X68127, A85396, AR066482, I50133, A44171, I50126, I50132, |
| | | | | | I50128, A85477, I19525, A86792, U87250, AR066488, X93549, AR016514, |
| | | | | | AR060138, A45456, A26615, AR052274, Y09669, A43192, A43190, |
| | | | | | AR038669, AR066490, AR066487, I14842, A30438, I18367, D88507, |
| | | | | | AR054175, D50010, Y17187, A63261, AR008408, AR008277, AR008281, |
| | | | | | AR062872, A70867, AF135125, I79511, AR016691, AR016690, U46128, |
| | | | | | D13509, A64136, A68321, AR060133, AB033111, U87247, Z82022, |
| | | | | | U79457, AF123263, AR064240, AR032065, A63887, AR060382, and |
| | | | | | AR008382. |
| HFKLD58 | 95 | 918235 | 1-348 | 15-362 | AI751333, AA324706, R16682, and T69796. |
| HFKLJ15 | 96 | 918247 | 1-488 | 15-502 | |
| HFKLL08 | 97 | 958065 | 1-417 | 15-431 | AA081810. |
| HFKLR52 | 98 | 879749 | 1-496 | 15-510 | H17284, H83139, AW247248, AW135333, T19309, AA427497, R78686, |
| | | | | | AA372220, T08998, T30713, C04405, M78822, H19555, R78660, H26455, |
| | | | | | AA134463, AC005943, and AF072247. |
| HFKLX38 | 99 | 880220 | 1-295 | 15-309 | |
| HFKLY01 | 100 | 914907 | 1-473 | 15-487 | R91200, and AI076204. |
| HFKM101 | 101 | 914876 | 1-400 | 15-414 | |
| HKDAE56 | 102 | 733549 | 1-317 | 15-331 | AW183074, AA746339, AA487204, AA486844, R86202, R73197, |
| | | | | | AA652204, W48671, and AL137485. |
| HKDAF34 | 103 | 703405 | 1-440 | 15-454 | AA664604, AA593471, F32893, AI820673, AA904275, AA558298, |
| | | | | | AI471418, AI732251, R82388, AI540840, AA601986, AI287921, |
| | | | | | AA679872, AA808998, AA574442, AA807583, AA226584, AA448838, |
| | | | | | AI754291, AA077776, AA130647, T03412, AI168205, AA669102, |
| | | | | | AI446474, AW238016, AA649682, AI457597, AA377730, AI357976, |
| | | | | | AW383952, AI357823, N23260, AA828047, AW069227, AA086318, |
| | | | | | AA488620, H71250, H55894, F23327, AA354821, AI355246, AA551798, |
| | | | | | AA809186, AA828867, AI569510, AA708678, AF034176, T65812, |
| | | | | | AI471691, AA599495, AI473701, AI279759, T47739, F27015, AW261996, |
| | | | | | AI627581, AI241705, F25301, AA610509, AI609223, AA557982, F33566, |
| | | | | | AI634187, AI284108, AW268190, AA652868, R93233, AA367788, |
| | | | | | AI457313, AL043721, AI290388, AI783911, H79849, AA226270, N23097, |
| | | | | | AL119838, H64278, AI797901, AI797892, AW189353, AI915293, |
| | | | | | AA461308, AA365307, AA828860, AA100672, AI358089, AI687962, |
| | | | | | AA599352, AA745524, AI709174, AA714073, AA775049, AA581914, |
| | | | | | AA483606, AA526724, AW440633, T86119, H79915, AA350886, |
| | | | | | AI251111, H72688, AP000049, AP000116, AP000311, AC005158, |
| | | | | | AC005887, AC000059, AF097738, AF196969, AP000011, AP000152, |
| | | | | | AP000269, AP000103, AC005856, AC006511, AL133243, AC002477, |
| | | | | | AC007535, AP001059, AP001058, AP000557, AC005295, AL034379, |
| | | | | | AP000504, AL132777, AL034349, AC004477, M87914, AC007161, |
| | | | | | AC007397, AL031230, AC006512, AF129756, AP000032, AL021578, |
| | | | | | AL031228, AL035703, AC004087, Z75747, AC004825, AC002367, |
| | | | | | AC002041, AF157065, AC003037, AC004859, AP000150, AC000085, |
| | | | | | AC002429, AC005701, AL031058, AC005755, AL096712, AC006111, |
| | | | | | AJ250915, AC003101, AP000251, AL034555, AP000030, AC004841, |
| | | | | | AP000009, AC006241, AC009501, AL035448, AC005358, AL023494, |
| | | | | | AC002457, AL079305, AC004979, AL132985, U80017, AC006539, |
| | | | | | AL109799, AC002039, AC005484, AC005696, AC005913, AC006132, |
| | | | | | AC004881, AC007546, AC005908, AL031770, AL121825, AC004814, |
| | | | | | AL034402, AL033517, AC002073, AC000118, AL008710, Z98036, |
| | | | | | AL022165, AC004761, AC003041, AL034420, AC004975, AC004522, |
| | | | | | AC005919, AC003962, AC005971, AC007298, AC006077, AL050321, |
| | | | | | AC004821, AL022302, AL031985, Z69890, AF134726, AC005399, |
| | | | | | AL121653, AC007363, AL022578, AC007917, AF019563, Z83840, |
| | | | | | AP000509, U02068, AF037222, AD000833, AL035450, AP000347, |
| | | | | | AL022400, AP000263, AC002536, AC005486, AC010582, AL117339, |
| | | | | | AC005567, AL031276, AC007308, AC006257, AP000497, AC004106, |
| | | | | | U50871, Z93016, AL096773, X87344, AL096791, U29874, AL035072, |
| | | | | | AP000133, AP000211, AP000100, AC005498, AC002105, AC016027, |
| | | | | | AL035587, AC005529, AL050332, AC005057, AF084941, U63630, |
| | | | | | D84394, AB014077, AC004209, AC006139, AC006009, AP000514, |
| | | | | | AC006356, AC006050, AC005037, AC005291, AC006261, U33208, |
| | | | | | Y10196, AC004234, AP000036, AC004854, AC004895, AP000272, |
| | | | | | AC004185, AF061032, AP000104, AC005368, AL020997, AC004263, |
| | | | | | AP000045, AC002377, AC005081, AC007312, Z99943, AC003002, |
| | | | | | AC007277, AC005274, AC003043, I34294, AL034421, AC005479, |
| | | | | | AC009542, AL022326, AC002045, AL121655, AC004231, AL049757, |
| | | | | | AL021918, AJ011930, AC004663, AL109946, AC009330, AC007388, |
| | | | | | AF178081, AC004152, AC000075, AC016473, AC009363, AC006966, |
| | | | | | AC005664, AL137191, AC006547, AC005899, AC002542, AL109628, |
| | | | | | AC005839, AP000350, AC004189, Z94044, AL031390, AC006088, |
| | | | | | AC005520, Z75744, U24498, AL096774, AC003667, AL117258, |
| | | | | | AC006368, AC005746, AC005257, AD000092, AF047825, AC004596, |
| | | | | | AL133448, AC005207, AP000502, AL034548, AL008735, Z70280, |
| | | | | | AC005277, AC009241, AL022311, D83402, AL022476, AF195658, |
| | | | | | AC000004, AL121852, AL049780, AC006530, AF205588, and AC004383. |
| HKDAF84 | 104 | 781937 | 1-386 | 15-400 | AA716460, AA938390, AA828592, AA719523, H40478, AI078409, |
| | | | | | AW237905, AA077637, AA722138, AA846923, AA709110, AI280266, |
| | | | | | AI858889, F27108, AI537368, AI521525, AA339923, AA604843, |
| | | | | | AA878140, AI653465, AI190648, AI244157, AA634991, AA298788, |
| | | | | | AA614864, AI300818, AI310992, AI860414, AA491743, AA182577, |
| | | | | | AA586646, AA947369, AW020150, AI926102, AI865375, AI703335, |
| | | | | | AI280500, AA297666, AA642809, AA381762, AA535216, AA654874, |
| | | | | | R62150, AI290405, AA074086, AI421783, AI491765, AW301712, |
| | | | | | AW246558, AR036572, U91328, AC006039, AC005993, AL035563, |
| | | | | | AC003049, AC007376, AC005592, AC005482, AC002302, AL034402, |
| | | | | | AC007425, AC008928, AC004585, AC004216, AC010206, AC005102, |
| | | | | | Z98200, AF001549, AC004791, AC002978, AC005207, AC004616, |
| | | | | | AC005011, AC005999, AC007655, AL035420, AC004125, AC006480, |
| | | | | | AC007263, AC004409, I34294, AL096776, AC007308, AL133355, |
| | | | | | AP000517, AC002390, AC007276, AC008012, AC002470, AC004106, |
| | | | | | AC005291, AC005215, AC002375, AC002492, AC000119, AF002993, |
| | | | | | Z98744, AC005057, AC005082, AC007284, AC003037, AC003043, |
| | | | | | Z99716, U62293, AC004859, AF109907, AL050308, AL035252, AC007240, |
| | | | | | AC004785, AP000689, AC009399, AC005911, U91321, AC005477, |
| | | | | | AC002094, AP000247, AL008726, AP000114, AP000216, Z98950, |
| | | | | | AC005295, AL022477, AC002128, AC005821, Z83826, AC002553, |
| | | | | | AC005261, AC004605, AC002554, AF196970, AL096701, AL050332, |
| | | | | | AC006293, AL078593, AF064861, AC006241, AC005839, AC006088, |
| | | | | | AC004707, AC008064, AL078602, AC002394, AC005971, AC005887, |
| | | | | | AP001053, AP000140, AC005780, AC006065, AC002384, U02052, |
| | | | | | AC009498, AC003982, AC009946, AL049712, AF111168, AC005412, |
| | | | | | AC004887, U91318, AL117258, AC004598, AL009181, AC003098, |
| | | | | | AP000088, AC005071, U52112, AF134726, AP000556, AC007685, |
| | | | | | AC007687, AC004856, AC004985, AL024498, AC005874, AF134471, |
| | | | | | AC005081, AC006285, AC007536, AL109758, AC005480, U91326, |
| | | | | | AC005697, AL139054, AC004702, AC011456, Z93241, AC004408, |
| | | | | | AL022327, U66059, AC008055, Z93930, Z84814, AC004687, AC003035, |
| | | | | | AC006115, AF121781, AL049795, AC006059, AL022323, AC004858, |
| | | | | | AC004797, AF051976, AC000026, AP000503, Z97055, AL031767, |
| | | | | | AC007546, AC004796, AL035405, AC004921, AC002538, AF047825, |
| | | | | | AC005484, AC005089, AF196969, AC002544, AP000512, AC007114, |
| | | | | | AL109956, AF111169, AC004542, AC005231, AC009501, AL049692, and |
| | | | | | AC002059. |
| HKDBC65 | 105 | 572866 | 1-58 | 15-72 | |
| HKDBI41 | 106 | 537508 | 1-321 | 15-335 | AL119324, AL119457, AL042544, AL119399, AL119443, AW392670, |
| | | | | | Z99396, AL119355, U46351, U46347, AL119319, AL119497, AL134902, |
| | | | | | U46349, AL134538, AW372827, AL119483, AL119464, AW384394, |
| | | | | | AW363220, AL119444, AL037205, AL119484, AL119363, AL119391, |
| | | | | | U46350, AL119418, U46341, AL119341, AL043019, AL042984, |
| | | | | | AL119439, AL119522, AL119396, U46346, AL119335, AL043033, |
| | | | | | AL119401, AL134531, AL134533, AL134528, AL119496, AL134525, |
| | | | | | AL134536, U46345, AL042433, AL042450, AL134542, AL042614, |
| | | | | | AL043029, AI142132, AL043011, AL042542, AL043003, AL042965, |
| | | | | | AL042975, AL042551, AL078614, AC004527, AB026436, AR060234, |
| | | | | | AR066494, AR054110, A81671, and AR069079. |
| HKDBL02 | 107 | 920498 | 1-524 | 15-538 | |
| HKIBB08 | 108 | 960371 | 1-289 | 15-303 | |
| HKIBB81 | 109 | 525592 | 1-357 | 15-371 | AP000011, and AP000152. |
| HKIMC34 | 110 | 573424 | 1-147 | 15-161 | |
| HKIXA02 | 111 | 920413 | 1-251 | 15-265 | AI223167. |
| HKIXA37 | 112 | 735445 | 1-336 | 15-350 | H49186, AL039679, N36307, AI940110, AW173245, T66334, AA157923, |
| | | | | | N42794, F12064, H58569, and AF091083. |
| HKIXB03 | 113 | 924636 | 1-667 | 15-681 | AA534863, AA746476, AI807346, AI807337, AA814725, AI342011, |
| | | | | | AA860170, AA862556, AI167626, AI565166, N90805, AA425316, |
| | | | | | AA063596, AA721653, AA927981, N50990, AI830609, AI700334, |
| | | | | | AI924447, AA928627, AA047076, AA844403, R41759, AI651907, H44039, |
| | | | | | H15256, F07545, F06839, R55583, AI952216, AI952225, W19518, |
| | | | | | AI658871, AA877252, AL133582, and AF169802. |
| HKIXB53 | 114 | 727457 | 1-361 | 15-375 | |
| HKIXB79 | 115 | 770139 | 1-398 | 15-412 | AA445925, and AA310604. |
| HKIXD42 | 116 | 683533 | 1-416 | 15-430 | AF222684. |
| HKIXG58 | 117 | 464241 | 1-239 | 15-253 | AW020280, AA737317, AI962169, AA516381, and AI650724. |
| HKIXH32 | 118 | 920217 | 1-365 | 15-379 | |
| HKIXI82 | 119 | 779905 | 1-431 | 15-445 | |
| HKIXM09 | 120 | 920219 | 1-84 | 15-98 | |
| HKIXM81 | 121 | 961026 | 1-331 | 15-345 | H92687, R51268, AW444753, R61794, AI094594, AI356668, AI361265, |
| | | | | | AI359113, R42776, AA634158, H11261, AI371482, AI423166, AA127468, |
| | | | | | T16365, T31025, T78304, AI627405, AL038445, AI567582, AL036673, |
| | | | | | AI863382, AA807088, AI335426, AI348777, AW161202, AL039086, |
| | | | | | AL038605, AW243886, AW020419, AW161156, AI468872, AI355779, |
| | | | | | AI364788, AL047655, AI567993, AI473799, AI537677, AI582912, |
| | | | | | AA641818, AA464646, AI923989, AI469775, AA715307, AI961589, |
| | | | | | AA809974, AI766348, AI345347, AW274192, AA748353, AI862144, |
| | | | | | AL045500, AI433157, AI648567, AI554821, AI866465, AW151136, |
| | | | | | AW151979, AI539771, AA738216, AI623736, AI590043, AW088903, |
| | | | | | AI494201, AW071417, AI500659, AI207510, AI815232, AI801325, |
| | | | | | AI500523, AI538850, AI866608, AI887775, AI582932, AI284517, |
| | | | | | AI872423, AI224027, AI500706, AI500061, AI445237, AI491776, |
| | | | | | AI611728, AW151138, AI889189, AI521560, AI500662, AL041150, |
| | | | | | AI539800, AW172723, AI284509, AL036631, AI440263, AI538885, |
| | | | | | AI889168, AI866573, AI633493, AI434256, AI289310, AI273179, |
| | | | | | AI866469, AI805769, AI434242, AI888661, AI500714, AI284513, |
| | | | | | AI888118, AI269862, AI859991, AI436429, AI889147, AI581033, |
| | | | | | AI371228, AI491710, AI440252, AL047422, R81679, AI866786, N29277, |
| | | | | | AI860003, AI610557, AI242736, AA761557, AI828574, AI887499, |
| | | | | | AA287231, AI539781, AW080402, AI539707, AI919593, AW089557, |
| | | | | | AI559957, AW167918, AI521571, AI307557, AI491852, AI371251, |
| | | | | | AW302924, AW020693, AW162194, AI537244, AL048644, AL041772, |
| | | | | | AL120254, AW051088, AI345335, AI620284, AI345688, AI557104, |
| | | | | | AW021717, AW150457, AI885949, AI345416, AI345612, AL120300, |
| | | | | | AI433037, AL046618, AL037454, AI799183, AI345415, AI671642, |
| | | | | | AI933992, AI698401, AI305745, AI889133, AI866820, AA743354, |
| | | | | | AI570966, AL038564, AI624963, AI251485, AW198112, AW274355, |
| | | | | | AL119791, AI890907, AI690946, AI610645, AW161402, AW020397, |
| | | | | | AW082113, AW058233, AI432644, AL036980, AL045672, AW268122, |
| | | | | | AI873704, F37471, AI538008, AI349598, AA572758, AL040241, |
| | | | | | AW089006, AW269097, AL119836, AW105459, AI310571, AI624279, |
| | | | | | AW268220, AI312428, AI252414, AW022682, AW191003, AW129264, |
| | | | | | AI866510, AI345180, AL045421, AI340603, AI285419, AI580674, |
| | | | | | AI348897, AW083804, AW071362, AI282355, AL039276, AW269098, |
| | | | | | AL135024, AI349256, AW268251, AI890507, R36271, AI312152, |
| | | | | | AI866461, AI923046, AI343091, AI247193, AL040694, AW075084, |
| | | | | | AL045620, AI310925, AI309443, AI242248, AL048375, AI307736, |
| | | | | | AW051453, AA420722, AL080011, AI312399, AI349937, AI307543, |
| | | | | | AI334884, AW268768, AI345251, AW071412, AL110306, AL036274, |
| | | | | | AI307708, AI922315, AI312325, AW071395, AI274759, AI340659, |
| | | | | | AF078851, U78525, E02221, AF090900, AL049283, AF176651, AF113690, |
| | | | | | A03736, A08916, AL050172, I89947, AL133075, AL122049, I48978, |
| | | | | | AL080126, X84990, AL117457, AL137533, AF061943, AF067790, |
| | | | | | AL122050, AF111851, AL137459, M27260, Z72491, E06743, AF113694, |
| | | | | | A77033, A77035, AF026124, X06146, AB007812, AL110280, AL137656, |
| | | | | | AR034821, A08913, X81464, S61953, AL050277, AR038854, M86826, |
| | | | | | I66342, AL117435, AL137548, AL080124, A08912, A08910, AF118094, |
| | | | | | Y11587, I89931, A08909, AJ003118, AJ005690, I00734, AL050393, |
| | | | | | AL122110, I49625, AL117460, AF017152, E00617, E00717, E00778, |
| | | | | | AF146568, A08908, AL133072, S78214, AF057300, AF057299, AF113689, |
| | | | | | AR038969, A18777, AL023657, AL137547, X72889, AR011880, |
| | | | | | AR068751, I89934, AL050024, AL110196, X62580, AF031147, AF159615, |
| | | | | | AL080234, I80064, AL137537, AB019565, AL117648, Y16645, AF118070, |
| | | | | | AF118090, AL049314, AL080158, AF081197, AF081195, AF113699, |
| | | | | | I03321, AL122098, AL137529, AF177401, U42766, AL137479, AL110218, |
| | | | | | AF113677, AL133558, AL133080, X70685, AL133081, AL110197, X52128, |
| | | | | | AF090886, AL133077, AL110225, AF106657, AL049465, X98834, |
| | | | | | AF026816, AL137538, S76508, E03348, AF090934, X79812, AF065135, |
| | | | | | AR029490, AL117583, AL110221, AL137550, AL096744, AF061573, |
| | | | | | AL122121, AF113013, I68732, A58524, A58523, AL137539, AF078844, |
| | | | | | S83456, AJ000937, AL080159, I33392, AL049382, U90884, AF153205, |
| | | | | | U00763, AL117649, AL122093, AL133113, AL137294, X65873, AF102578, |
| | | | | | AL080163, AF008439, AL122123, AL133104, AF017437, AF090943, |
| | | | | | X87582, AJ238278, AF094480, E01314, D16301, AL133665, E01614, |
| | | | | | E13364, AL137480, AF100781, AF114170, I89944, AF097996, AF069506, |
| | | | | | I48979, U68233, I92592, AL050149, AL050116, AF090901, AL050092, |
| | | | | | AL110222, AJ006417, A15345, AL137283, AL080074, AL049452, |
| | | | | | AF000301, S68736, AL050155, AL133619, E15569, E07361, AF100931, |
| | | | | | AL049300, AR013797, A65341, Y11254, AR000496, U39656, A08907, |
| | | | | | AL122111, Z82022, X92070, Y09972, AF058921, I09499, U96683, |
| | | | | | AL133568, AL133565, AF079765, S77771, Y10655, S75997, AR020905, |
| | | | | | AB016226, AF126247, S36676, AF067728, AF087943, AL117416, I17544, |
| | | | | | I30339, I30334, AF090903, AL133016, AL080140, AF158248, AL137527, |
| | | | | | AL133010, AL137641, X93495, X63574, AB029065, X53587, D83032, |
| | | | | | AC002467, X63410, AF091084, AL137478, AF079763, E15324, AL133557, |
| | | | | | Z37987, AF162270, AF205861, AF125948, U35846, AF106862, X96540, |
| | | | | | AF113691, AL080060, and AL137429. |
| HKIXP16 | 122 | 881511 | 1-1160 | 15-1174 | AW205069, AA189103, AA582811, AA326944, AW207340, R83516, |
| | | | | | R83501, AI823332, AA191201, AA984461, AA058749, and AA017452. |
| HKIXQ25 | 123 | 681855 | 1-478 | 15-492 | AI798901, AW148631, and AI700179. |
| HKIXX58 | 124 | 666516 | 1-210 | 15-224 | AA062779, AW080899, and AW366555. |
| HKIXY04 | 125 | 736085 | 1-320 | 15-334 | AI057150, H49739, AI984831, AI884976, AI421871, AW071893, |
| | | | | | AI457802, AI799691, AI094736, AI417318, H46204, AI458974, AA063092, |
| | | | | | AI421296, H18874, AI366673, AI076029, and L08074. |
| HKIYF45 | 126 | 970756 | 1-385 | 15-399 | AA299177, AI279417, N63249, AA533762, H72530, AA507822, |
| | | | | | AA644090, AA747977, R72148, AW275719, AW265735, AI912401, |
| | | | | | AL079734, AA565232, AA535216, AI821918, AI457389, AA559241, |
| | | | | | AW301809, AI186438, AL118612, AA630854, AA077737, AI039539, |
| | | | | | AW340905, AI560085, T57774, AA452887, AA581247, AI207465, |
| | | | | | AA994578, AA084609, AA527209, AI471691, AI311647, AI587349, |
| | | | | | F08248, Z82243, AC005783, AC004910, AF205588, AC006552, AL031595, |
| | | | | | AL117337, Z15025, AC003007, AC006947, AC005088, AF030453, |
| | | | | | AL035587, AC002350, AC005722, Z99716, AL109847, AC004929, |
| | | | | | AL022313, AC005919, AP000505, AC005632, AC004491, AC007845, |
| | | | | | Z84466, AC007371, AC003101, AC002468, AC005037, AC005800, |
| | | | | | AL049780, AF129756, Y14768, AL031681, AP000193, AF121781, |
| | | | | | AC005071, AC004985, AC005067, AP000050, U82668, AL121603, |
| | | | | | Z97353, AL021918, AC006254, AL022721, AL031311, AC007055, |
| | | | | | AC002369, Z82189, AP000117, AC006071, AL078638, AL009181, |
| | | | | | AC004905, U96629, AC005015, Z83844, AC005295, AL034420, |
| | | | | | AC004955, AC005081, AP000688, AL133243, AC007461, Z82198, |
| | | | | | AC002310, AC006077, U91322, AC006026, AF111169, AC005399, |
| | | | | | AC006449, AC000026, AC002544, AC004836, AC005940, AP000066, |
| | | | | | AC002113, AC002477, AC002565, AC003010, Z85986, AC007011, |
| | | | | | AC016025, AC004975, Z95331, AL031680, AC007934, AP001067, |
| | | | | | AL035422, AF207550, AL133245, AL133244, AF134726, AL022326, |
| | | | | | AF043945, AC006597, D87009, AC006023, AC006123, AL022324, |
| | | | | | Z83840, AC005527, AF088219, AC016026, Z96074, AC004813, AC005844, |
| | | | | | AC002425, AF047825, AC005280, AC005014, AC002559, AL109952, |
| | | | | | Z95152, AC005207, AL034549, AP000305, AC004966, Z86090, AC005245, |
| | | | | | AC007666, AC005619, AC005525, AP000501, Z93017, AC005899, |
| | | | | | AB023049, AC006006, AC005697, AC004859, AC004472, AC004525, |
| | | | | | AC005233, AC004134, AC007066, AL117328, AC004125, AC005095, |
| | | | | | Z97054, AC005553, AL008710, AC004263, AL009031, AP000047, Z82195, |
| | | | | | AC006479, AC004973, AL109627, AL035405, AC004383, Z93930, |
| | | | | | AL022476, AL050307, AC005529, AC003982, AC008249, AC006241, |
| | | | | | AC007041, AL133448, AL133353, AC004476, AC005531, AF038458, |
| | | | | | AC004972, AL031848, AC004797, AC007386, AL049839, AC009248, |
| | | | | | AL031281, AL022163, AL021155, AJ246003, Z94056, AC004104, |
| | | | | | AC003689, AP000115, AC012627, AC008012, Z84480, AC009247, |
| | | | | | AC005695, AC005274, AC004470, AC006512, Z83822, AC007201, |
| | | | | | AC005736, AC005837, AC007687, AL035659, AL021397, AC005755, |
| | | | | | AL022332, AC005318, AC005209, AB003151, AC005225, AP000511, |
| | | | | | AL009174, AC004408, AC005900, AL022165, AC002306, AL024474, |
| | | | | | AC005702, AC004522, AC007458, AC005664, AC005548, AL023280, |
| | | | | | AL031003, AL034429, AP000215, AC005972, AL139054, AC006328, |
| | | | | | AC004835, AC004019, AL121658, AJ011930, AC006021, AL049540, |
| | | | | | AC005519, AC000025, AC003108, AL096801, AC004707, AC004895, and |
| | | | | | Z99495. |
| HKIYJ26 | 127 | 927503 | 1-155 | 15-169 | |
| HKIYJ63 | 128 | 703320 | 1-351 | 15-365 | AI813822, M86178, and D56993. |
| HKIYK78 | 129 | 699311 | 1-75 | 15-89 | AA632824. |
| HKIYQ89 | 130 | 625636 | 1-226 | 15-240 | AI791534, AI277912, AI291379, AI733045, and AF079765. |
| HKMAA07 | 131 | 954358 | 1-368 | 15-382 | AI284640, AA327323, H81283, AI281697, AL079843, AA829223, |
| | | | | | AW440976, AA649642, AI824562, AI282336, AW236342, AI801591, |
| | | | | | AI053672, AI674873, AA649484, AA199616, AA649542, T06828, |
| | | | | | AL137954, AW270382, AA077817, AA559290, AI334443, N25296, |
| | | | | | AA513293, AI801701, AA977743, AA603156, AA649722, AI249997, |
| | | | | | AA649705, R38154, AA825357, AA099612, AA831599, T94866, |
| | | | | | AL041733, T71030, AA368936, AA747480, N54902, AA664535, T41124, |
| | | | | | AA552885, AA768097, AA558060, AA605274, AA579727, AI312149, |
| | | | | | R97934, AI688846, H50727, AA810370, AA650450, W47183, AI270117, |
| | | | | | H81733, AA100372, AA515435, AA504638, AA824654, AA552945, |
| | | | | | AA629874, AI002820, AI830390, AA664015, W79504, AA804379, T69435, |
| | | | | | AA441788, R88888, AA862173, AA350859, AA927092, AA317170, |
| | | | | | T47739, AA771811, AA331025, H64778, AW088058, AI888008, |
| | | | | | AW276435, AA521399, AA533036, AI291124, AA916371, F23274, |
| | | | | | AA167673, F34826, AI291268, AI339440, AI358571, AI537030, |
| | | | | | AA461233, AA526779, AA167659, F36273, AI264743, H81785, AI963095, |
| | | | | | AA012982, AI471481, R91994, T67515, AA745410, T05101, AA599920, |
| | | | | | H23455, AW276827, AI358501, F23250, AA513972, AW406659, |
| | | | | | AA632624, N29933, AL046409, AA601499, AI709365, AA643962, |
| | | | | | AL040948, H56729, AI002834, AA568778, H02631, AI246796, AW406447, |
| | | | | | AI446464, AA650271, AL120269, AI281903, AA557879, AI061296, |
| | | | | | F18974, AA662998, AA401657, AF150152, T07451, AI469172, AA020850, |
| | | | | | AI144330, T93015, AI268812, AW190760, AA604869, AA662992, |
| | | | | | AW193265, H69640, F34511, AA858197, AA779040, AA587256, |
| | | | | | AA728873, D57369, AI371070, AA525876, AA688036, AI379719, H94870, |
| | | | | | AA244357, AA678443, AI623898, AA934680, AW338086, AA229785, |
| | | | | | AA578391, AA947547, W16581, AA610783, AW193432, AA503473, |
| | | | | | AI281881, AW072587, AA824655, H02251, AW261871, AI928790, |
| | | | | | AA564859, F35673, AI431303, AA774184, R93061, AA127435, F25203, |
| | | | | | AA177063, AA364429, H92548, AA521323, AA483731, AA521277, |
| | | | | | AA702293, AA846935, T41155, AC004227, U07000, AL049776, |
| | | | | | AC004531, AC002433, Z95152, AP000555, AL132712, AC002531, Z93930, |
| | | | | | AC016831, AC005251, AL096707, Z30983, AC004477, AC006572, |
| | | | | | AC005037, AP000952, AL021579, AL049589, AC007050, AC007041, |
| | | | | | AC005090, AL049829, AL049745, AL023494, AC007066, AC004447, |
| | | | | | AC006064, AC006515, AC005881, AL078621, AJ010770, AL133245, |
| | | | | | AC005288, AP000567, AL022326, Z95114, AC000111, AP000553, |
| | | | | | AC007386, AF117829, AC004738, AC006137, AF178030, AL034349, |
| | | | | | AF053356, AL024474, AP000343, AL049552, AC004066, AC004125, |
| | | | | | AP001053, AC000379, AC004988, AC005244, AC009178, AL133500, |
| | | | | | AL078638, AC009802, M87917, AC008064, AC008372, AC004884, |
| | | | | | M87916, AC005768, U62317, AC005175, AL035697, AC004167, |
| | | | | | AC002312, AC006121, AC004455, AP000556, AP000557, AP000552, |
| | | | | | AC009516, AL035699, AL022160, M87918, AC005246, AC006518, |
| | | | | | AL132777, AL035684, AL009173, AC010170, AC004526, AF111169, |
| | | | | | AC005699, AC005562, AC006144, AC005924, AL109618, AL035425, |
| | | | | | AC004917, AL078634, X75335, S70707, AC008173, Z97206, Z49155, |
| | | | | | AC007695, AL008728, AP000080, AP000018, AC002551, AC006205, |
| | | | | | AL031177, AF106564, AC007214, AL031664, AC006480, AC005531, |
| | | | | | AL008720, AC005516, X54179, AC000159, AC005779, U02058, |
| | | | | | AC007216, Y10196, AL109654, AC007285, AC005837, AC004859, |
| | | | | | AC004916, AC005084, AL034420, AL110122, AC007324, X55932, |
| | | | | | AP000359, AF017104, AC008101, AC002073, AC007390, AC006151, |
| | | | | | AP000657, AC007676, AL035405, AC003024, AC002426, U13056, |
| | | | | | AL080114, AC007075, AC001163, AC008079, AL049766, AC006130, |
| | | | | | AC003010, Z94865, Z82976, U61375, AC004475, AL023575, Z99756, |
| | | | | | AC006525, AF165175, AC006486, AC004879, AC004542, AL021808, |
| | | | | | AC005701, AL022329, AC006305, U02048, AC004972, AC002449, |
| | | | | | Z93783, Z84469, AP001068, AC004675, AL096710, AC009181, AC007429, |
| | | | | | AL035423, U92032, Z84489, AC006063, AC005703, AL031311, U91326, |
| | | | | | AC006450, U18394, X55925, U18393, X54176, U57005, AC004687, |
| | | | | | I51997, X55928, AC005792, U18390, Z93021, Z83001, AC003665, |
| | | | | | AL008629, AL022476, M87919, U57006, S70697, AC002402, AC005281, |
| | | | | | U63721, AJ223364, X52851, AF175325, AL022311, AL133289, U14689, |
| | | | | | U72787, AF094481, Z85989, AC005763, AC002077, AC004152, Z75746, |
| | | | | | L34079, Z49236, AC004221, AC005625, AC002056, AC005688, AP001043, |
| | | | | | AC004699, AL109621, AC005003, AL008709, AF017732, AL035494, |
| | | | | | AL022575, Z94801, AL049859, AF121781, AL035681, AC002564, |
| | | | | | AL132776, AC000118, AL050348, AL121655, AC004217, and AC003087. |
| HKMAD31 | 132 | 825566 | 1-342 | 15-356 | |
| HKMAD43 | 133 | 842064 | 1-203 | 15-217 | |
| HKMBA17 | 134 | 534523 | 1-128 | 15-142 | AC005293. |
| HKMBD44 | 135 | 715761 | 1-157 | 15-171 | AC005293. |
| HKMLD48 | 136 | 575873 | 1-379 | 15-393 | AW025715, and AI460301. |
| HKMLJ39 | 137 | 705467 | 1-411 | 15-425 | H72622, R89288, and H47983. |
| HKMLM38 | 138 | 951020 | 1-333 | 15-347 | AW026332. |
| HKMLN96 | 139 | 881479 | 1-423 | 15-437 | |
| HKMLS46 | 140 | 575879 | 1-331 | 15-345 | |
| HKMMB01 | 141 | 851712 | 1-69 | 15-83 | F31737, C05097, AW292351, AA293615, AA232172, F32267, W39303, |
| | | | | | AA219693, AA062553, AA489273, AA629322, AI954937, AI004409, |
| | | | | | AA069747, AA193645, AA406524, N56499, N90393, AW105577, |
| | | | | | AA447848, AA535460, AA021181, AA009649, AW149464, AA975649, |
| | | | | | AA974657, AA310963, AA378894, AA436530, H15979, W07688, |
| | | | | | AA187461, and H08985. |
| HKMMF21 | 142 | 969002 | 1-845 | 15-859 | AL043121, AA774273, AI281498, AI494568, H26563, and AI971558. |
| HKMMG47 | 143 | 720379 | 1-319 | 15-333 | AA393293, AA776793, AA621738, AA398634, and AI015507. |
| HKMMJ67 | 144 | 575750 | 1-339 | 15-353 | R11510, AA653291, AW007980, AA804334, T93227, AA666205, |
| | | | | | AI336398, AA015948, AI915270, H48768, AA070462, AA598627, |
| | | | | | AA935827, AA230155, H90688, AA665475, AI567391, AA329535, |
| | | | | | H87756, AI096738, AI298597, AL118912, F31575, AA564925, AA559166, |
| | | | | | AA653955, AA565911, AA984920, W23432, AL118925, AA604515, |
| | | | | | AI275982, AA523695, AA583579, AI749306, AI469468, AA226770, |
| | | | | | R20234, AI627917, AA074252, AI791145, N76251, AA846969, AA507526, |
| | | | | | AI694178, AA583568, AA838162, AA706845, AA548221, AI187148, |
| | | | | | F02188, AA745183, AA351808, AA056569, AA077886, AI299192, |
| | | | | | AA834769, AI349130, AL138252, AI310670, AA564642, AL048291, |
| | | | | | T05684, W31062, F09188, AA454504, AA304858, AA932787, AI270177, |
| | | | | | U46402, N54179, AI888261, R93026, F07564, AP000152, AC004856, |
| | | | | | AL022316, L47234, AC005736, AC005562, AC002565, AL034420, |
| | | | | | AC007226, AC002492, AC005666, Z85986, AC005081, AC003663, |
| | | | | | AC005484, AL121852, AC006064, AP000501, AC002347, AC007051, |
| | | | | | AC007919, AL023553, AC004262, U63630, AL034554, AP000689, |
| | | | | | AC008171, AC005914, AC007225, AC004813, AC004797, AL096791, |
| | | | | | AL109827, AC006262, Y14768, AP000505, AC004019, AF196779, Z95115, |
| | | | | | AL133353, AC000052, AC006441, AC007057, AC004655, AC005899, |
| | | | | | AL031677, AC005049, AL034429, AF109907, AL021939, AP000305, |
| | | | | | AC005971, AC006251, AC004143, AC007314, AP000512, AL008635, |
| | | | | | AC010205, AL022721, AP000556, AP000032, AC005215, M63543, |
| | | | | | AP000047, AL008725, AL078596, AL021579, AC005409, AL031846, |
| | | | | | AC002365, AC003070, AC004447, AL122020, AC004462, Z83846, |
| | | | | | AF207550, AC002389, AC006449, M63544, AL049766, AC005089, |
| | | | | | AC007096, AL031295, AC004067, AP000115, AC004967, AL035462, |
| | | | | | AC005844, AC007263, AC000026, AC011456, Z98752, AC005730, |
| | | | | | AC006480, AC004890, AC003689, AL049834, AC005237, AC007308, |
| | | | | | AC003982, AC006011, AP000499, AP000547, AC002470, AC004938, |
| | | | | | AF124523, AC004232, AC006530, AL035681, AC009516, AL049795, |
| | | | | | AL035410, AC005920, U91326, L77570, AL035420, AL109963, |
| | | | | | AC005088, AL031003, AF045555, AP000558, AF184110, AF117829, |
| | | | | | AP000050, AC003098, AC005782, AC004686, AP000031, AC005763, |
| | | | | | AC004905, AC004802, AC004629, AL022069, AF190465, Z92542, |
| | | | | | AL031291, AC004073, L39891, AP000557, AF053356, AP000117, |
| | | | | | AL008712, AC005288, AC004832, AC005725, AP000466, Z98044, |
| | | | | | AC005229, AC000003, AC005231, AL022313, AC004383, AC002985, |
| | | | | | AC006388, AJ246003, AP001058, AC006071, AL109952, AB026898, |
| | | | | | AC004531, AF118808, AC003003, AL049761, AC004878, AC007151, |
| | | | | | AL031668, X04981, AL031589, AC005684, AC004859, AL022323, |
| | | | | | AL079342, AL121652, AL020995, AL121658, AC004601, AC005598, |
| | | | | | AC007551, AC004084, AL049830, AC007637, AC004675, AC005600, |
| | | | | | AL109753, AC004020, AC002115, AC003043, AC002990, AL133245, |
| | | | | | AC007450, AC003041, AL049696, AL022322, AC006121, AC006059, |
| | | | | | AC004941, AC005565, AC004230, Z98036, AL049780, AC005803, |
| | | | | | AP000688, AL049699, AL049839, AC005932, AC006538, AL022162, |
| | | | | | AC006559, AP000112, AP000044, AC002477, AL022327, AL135960, and |
| | | | | | AJ131016. |
| HKQAF25 | 145 | 529197 | 1-438 | 15-452 | |
| HRAAC11 | 146 | 966861 | 1-366 | 15-380 | |
| HRAAS14 | 147 | 658067 | 1-294 | 15-308 | |
| HRABC50 | 148 | 720370 | 1-261 | 15-275 | |
| HRABQ95 | 149 | 961330 | 1-453 | 15-467 | A90834. |
| HRABT03 | 150 | 923842 | 1-546 | 15-560 | |
| HRABY74 | 151 | 666239 | 1-360 | 15-374 | AA747489. |
| HRACE09 | 152 | 625425 | 1-128 | 15-142 | AI524975, and AL049742. |
| HRACF86 | 153 | 867212 | 1-362 | 15-376 | |
| HRACK33 | 154 | 701937 | 1-310 | 15-324 | |
| HRACL64 | 155 | 674012 | 1-350 | 15-364 | D63222, AL049780, and AC007055. |
| HRACM94 | 156 | 785191 | 1-381 | 15-395 | |
| HRACW03 | 157 | 923428 | 1-485 | 15-499 | |
| HRACW27 | 158 | 682578 | 1-519 | 15-533 | |
| HRACW36 | 159 | 708201 | 1-544 | 15-558 | AC005746. |
| HRACW69 | 160 | 708769 | 1-524 | 15-538 | Z59283. |
| HRACY16 | 161 | 659733 | 1-443 | 15-457 | |
| HRADF21 | 162 | 670398 | 1-326 | 15-340 | T89839. |
| HRADJ92 | 163 | 756539 | 1-450 | 15-464 | |
| HRADN24 | 164 | 877323 | 1-463 | 15-477 | AA320117, AI005063, AW182019, and AI419865. |
| HRADP10 | 165 | 963784 | 1-503 | 15-517 | AI699927. |
| HRADP39 | 166 | 732757 | 1-491 | 15-505 | |
| HRAEC03 | 167 | 923401 | 1-461 | 15-475 | |
| HRKAB10 | 168 | 968272 | 1-329 | 15-343 | AL117354. |
| HRKAB42 | 169 | 575562 | 1-489 | 15-503 | |
| HRKAE11 | 170 | 967519 | 1-423 | 15-437 | |
| HRKAF31 | 171 | 698347 | 1-360 | 15-374 | H78377, and AA521207. |
| HRKAE24 | 172 | 677443 | 1-458 | 15-472 | T60013, T59943, and AC005730. |
| HRKAC62 | 173 | 742429 | 1-282 | 15-296 | H85425. |
| HRKAB80 | 174 | 930473 | 1-342 | 15-356 | C16308. |
| HRKAA82 | 175 | 880783 | 1-464 | 15-478 | AI283411, and AA658041. |
| HRAEF05 | 176 | 931998 | 1-720 | 15-734 | AA664000, T79318, and AC004751. |
| HRAED30 | 177 | 867176 | 1-399 | 15-413 | Z45488, F06844, and F06845. |
| HRAEB43 | 178 | 714842 | 1-374 | 15-388 | N54560, AP000240, and AP000096. |
| HRAEB29 | 179 | 690179 | 1-360 | 15-374 | AI268324, AA059045, AA902370, and AA058983. |
| HRADZ48 | 180 | 883281 | 1-553 | 15-567 | |
| HRADZ34 | 181 | 703680 | 1-198 | 15-212 | H67464. |
| HRADZ26 | 182 | 681117 | 1-448 | 15-462 | AI493184, AA045538, AA043428, AA043429, AA456045, AA056933, and |
| | | | | | AA455405. |
| HRADR43 | 183 | 714857 | 1-308 | 15-322 | H39785, and AA449864. |
| HRADR21 | 184 | 830039 | 1-138 | 15-152 | AA262832, and AC007386. |
| HRADO13 | 185 | 656380 | 1-434 | 15-448 | H25660. |
| HRADM45 | 186 | 717358 | 1-468 | 15-482 | AA418916, AA426580, AJ271722, AP000260, AP000036, AF055919, |
| | | | | | AP000099, and AP000098. |
| HRADK79 | 187 | 774597 | 1-427 | 15-441 | R74368, N91304, AA355100, AA341453, and AL133019. |
| HRADE49 | 188 | 722595 | 1-454 | 15-468 | H59422. |
| HRADC18 | 189 | 665268 | 1-436 | 15-450 | R25089, T80075, T74125, R17491, F12383, T80363, and Z42149. |
| HRADA93 | 190 | 792001 | 1-381 | 15-395 | H80804, and AA018791. |
| HRADA17 | 191 | 867198 | 1-685 | 15-699 | AA573432, AI580135, AA505816, AA854201, AA767090, T06331, and |
| | | | | | H85075. |
| HRACX37 | 192 | 711466 | 1-422 | 15-436 | H70301, H90332, AI188509, W16618, AI907810, N40106, AA306845, |
| | | | | | AA459427, R73372, R27210, R27220, R69145, AA229423, AA126690, |
| | | | | | AA976946, N42379, H91785, AA188772, AA126582, AI885640, R23074, |
| | | | | | AI206563, AI139889, AA654555, AI052590, AA230120 AI347291, |
| | | | | | AW192757, AA132427, W05104, AI471542, AA135777, AI986230, |
| | | | | | H91108, AA707153, AW262764, W48771, AC005041, AC006544, |
| | | | | | AF100753, AF100754, AF100746, and U41736. |
| HRACV73 | 193 | 764141 | 1-145 | 15-159 | AA057691. |
| HRACV26 | 194 | 793997 | 1-640 | 15-654 | AA651639, AI469599, AA574442, AI345681, AI345675, AW419262, |
| | | | | | AA610509, H53168, AW270258, N70143, AW341903, AI144055, |
| | | | | | AI587583, AI587565, AI581486, AA657835, AW407578, AI133083, |
| | | | | | AW157005, AI338426, AL042635, AA584489, AI610920, AI564185, |
| | | | | | AI915293, AW304584, AI028510, AA992126, AI926102, AI753113, |
| | | | | | AA720732, AC005736, AC002352, AC002073, AL035461, U95090, |
| | | | | | AC006211, AC007546, AC006285, AC016025, AL008718, AC004859, |
| | | | | | AC003043, AL022165, AC005071, AL109758, AC005081, AC004531, |
| | | | | | AC005837, AL096791, AC007201, AC006468, AL031055, AC006071, |
| | | | | | AC005619, AC005037, AL022237, AP000555, AC006581, AL109827, |
| | | | | | Z85987, AF111167, AC005971, AL023575, AC006121, AC005015, |
| | | | | | AC004815, AL049872, AC004491, AE000658, L78833, AL035683, |
| | | | | | AC004963, AC007308, AC002288, AC004019, AL022336, AC000353, |
| | | | | | AL049766, L78810, AC000052, AC004659, AC006449, AC005399, |
| | | | | | AC005209, AL034548, U85195, AC004991, AL024498, AC005632, |
| | | | | | AC007227, AL035458, AL008726, AL021546, AC005921, AC004134, |
| | | | | | AL049745, AC005841, AC007666, U47924, AC002994, AP000045, |
| | | | | | AC006480, AL135744, AC004882, AC007285, AL022476, AD000092, |
| | | | | | AF030876, AL049761, AC004596, AC004000, AC007686, AJ003147, |
| | | | | | AP000513, AC004217, AC005261, AL121769, AL021154, AB023048, |
| | | | | | AC002312, AC007114, AC002301, AC004834, AL135960, AJ131016, |
| | | | | | AC005520, AC005004, AC003108, AF111168, U82828, AC005089, |
| | | | | | AC004686, AL121603, AC008372, AC006966, AP000212, AP000134, |
| | | | | | AC002996, AP000117, AC005899, AC007676, AL109865, AL050318, |
| | | | | | AL121653, AP000349, U91321, AC010582, Y07848, AL021917, |
| | | | | | AC005822, AC005102, AC005288, Z84466, AL031431, AL096701, |
| | | | | | AC004263, AL049540, AC005911, AC005839, AL022316, AC005049, |
| | | | | | AL031662, AC005529, U91323, AC007386, AC002527, AC006965, |
| | | | | | AC006064, AL049636, AL024507, AL133163, AC007193, AC009247, |
| | | | | | AF001549, U80017, AC007688, AL049869, AC004216, AL109613, |
| | | | | | AP000505, AC005484, AP000557, AL020993, AP000152, AC004797, |
| | | | | | AF139813, AC007537, AC005823, AF001552, AL080242, AC005920, |
| | | | | | AC005486, AL031774, Z84469, AC004230, AC004858, AC006277, |
| | | | | | AF196779, AP000248, AC005088, AC003070, AF196969, AC002395, |
| | | | | | AP000065, AL008582, AC005043, AC022517, AF111169, Z95152, |
| | | | | | AL049776, AC007057, AC002470, AC005988, AP000501, AC007216, |
| | | | | | AL033527, AC004967, AC005377, AC006057, AL050307, AL031427, |
| | | | | | AF109907, AC004408, AC006512, AC006251, AC006948, AC018633, |
| | | | | | AC005231, U95739, Z98941, Z95113, Z85986, AL031311, U95742, |
| | | | | | AL034549, AC004821, AL022238, AL022318, AL133371, AC005207, |
| | | | | | AC005480, AL139054, AC006088, AC006538, AC004913, AF205588, |
| | | | | | AC004605, AC007226, AC005291, AC005740, AL009181, AL109984, |
| | | | | | AC002091, Z99716, Z98036, AC004887, AC006430, AC007774, and |
| | | | | | AC006146. |
| HRACT91 | 195 | 789974 | 1-1105 | 15-1119 | AI761584, AI452446, AI564993, AA428692, AA429277, D60307, |
| | | | | | AI204130, AW206702, D60210, AI049636, D60211, AW051267, |
| | | | | | AA402443, D60308, H64707, AA912390, R12661, D81473, Z45744, |
| | | | | | AA293842, AW369660, AW369633, AW369689, and AA156894. |
| HRACR57 | 196 | 745443 | 1-552 | 15-566 | AA877534, AI934510, AA055383, W07505, W69338, and W88492. |
| HRACR49 | 197 | 722524 | 1-213 | 15-227 | |
| HRACM83 | 198 | 780394 | 1-522 | 15-536 | N62132, N45978, and AC005162. |
| HRACH20 | 199 | 669556 | 1-639 | 15-653 | N21499, R20462, R13242, and R20071. |
| HRACF04 | 200 | 615036 | 1-428 | 15-442 | N53719. |
| HRACD65 | 201 | 918345 | 1-458 | 15-472 | T88854, AA255775, W26641, N41302, AA410811, AL031297, and |
| | | | | | AL117233. |
| HRACC06 | 202 | 867214 | 1-358 | 15-372 | AA528258, R07857, T50622, AC006347, AL049710, AC004765, and |
| | | | | | U51010. |
| HRACA82 | 203 | 778964 | 1-377 | 15-391 | AA287885, AA233147, AI057520, AI452790, AI034327, AI042330, |
| | | | | | AW300416, AA504817, AA282203, and AW292179. |
| HRACA19 | 204 | 668528 | 1-590 | 15-604 | T94250. |
| HRABZ94 | 205 | 793278 | 1-883 | 15-897 | AA203682, R11958, and AL023913. |
| HRABZ67 | 206 | 751496 | 1-455 | 15-469 | AW082208, AI130971, AJ689477, AI384096, AI127759, AI393165, |
| | | | | | AI986215, AI129980, AW263339, H04472, AI300059, R01272, F00396, |
| | | | | | N52203, F00413, N57809, and AC004542. |
| HRABR30 | 207 | 691157 | 1-462 | 15-476 | T92597. |
| HRABO60 | 208 | 871380 | 1-512 | 15-526 | AA548533. |
| HRABO08 | 209 | 959104 | 1-537 | 15-551 | AI927074, AI927063, AW207590, and AI288011. |
| HRABM45 | 210 | 875735 | 1-613 | 15-627 | R56681, H64690, H86726, AW204431, H65184, AA133944, AW135934, |
| | | | | | AC003663, and AL050339. |
| HRABD15 | 211 | 867228 | 1-471 | 15-485 | AI767564, AI478603, and AI478594. |
| HRABC08 | 212 | 959124 | 1-474 | 15-488 | H98167, N20650, N22462, AA554457, and AL133427. |
| HRABA59 | 213 | 867239 | 1-516 | 15-530 | AI082362. |
| HRABA25 | 214 | 847318 | 1-305 | 15-319 | AA101076, AI862736, AA709152, AA830942, AA766567, AA708948, |
| | | | | | AA976015, AA179314, AI696090, AW058602, AA236485, AI470182, |
| | | | | | AI636141, AI740927, AA441789, AA483384, AA806410, AW450175, |
| | | | | | AI990817, H01020, R63373, AA482750, R63424, and AB020636. |
| HRAAW62 | 215 | 742631 | 1-321 | 15-335 | AI867370, AA045092, and AI687863. |
| HRAAO95 | 216 | 582177 | 1-650 | 15-664 | W69604. |
| HRAAM31 | 217 | 945071 | 1-1232 | 15-1246 | AC006230. |
| HRAAJ29 | 218 | 867255 | 1-614 | 15-628 | AI624968, AI624948, AA837331, AI624973, AA526412, AI624957, |
| | | | | | AC004040, AL031276, Z84814, AC005480, and AF129756. |
| HRAAI91 | 219 | 790090 | 1-638 | 15-652 | H78468, and R08726. |
| HRAAH86 | 220 | 785398 | 1-517 | 15-531 | AI023753, AA001229, and AA001641. |
| HRAAD24 | 221 | 676567 | 1-545 | 15-559 | AA421924, AI831586, AI809492, AI459208, AI004779, AW016677, |
| | | | | | AA284915, AA723667, AW192116, AA223870, AW242807, AW072338, |
| | | | | | T54449, T54509, AI636686, AA642433, AA805919, AA828462, AA825472, |
| | | | | | AW418510, AA480341, AI250716, AI250588, AI334750, AI284803, |
| | | | | | AI250328, AI340813, AI307038, AI311955, AI223588, AI223723, |
| | | | | | AI250596, AI270886, AI224332, AI223516, AC006208, and AL117428. |
| HRAAD13 | 222 | 657088 | 1-512 | 15-526 | R91223, and AC002379. |
| HKTAB66 | 223 | 525582 | 1-341 | 15-355 | AI792876, AW271346, AI671738, AI935429, AI632015, AI650906, |
| | | | | | AI913380, AI822004, AI627643, AI522001, AI670856, AI498352, |
| | | | | | AI493102, and AI261726. |
| HKTAA13 | 224 | 971677 | 1-350 | 15-364 | AA214502, and AA215293. |
| HKPMB95 | 225 | 795060 | 1-415 | 15-429 | N39433, N39449, AW236570, AI989655, AL031650, and AC012627. |
| HKPBA75 | 226 | 767550 | 1-293 | 15-307 | R63681, AC004815, and AC020663. |
| HKPBA63 | 227 | 525587 | 1-374 | 15-388 | |
| HKPBA51 | 228 | 518897 | 1-57 | 15-71 | |
| HKMSA84 | 229 | 783091 | 1-616 | 15-630 | H72903, Z69715, and AL031681. |
| HKMSA12 | 230 | 970839 | 1-484 | 15-498 | AA748780, AI288540, and AW303631. |
| HKMNC21 | 231 | 575816 | 1-438 | 15-452 | AL035070. |
| HKMMY63 | 232 | 745145 | 1-386 | 15-400 | R48693, and AL031985. |
| HKMMX31 | 233 | 731638 | 1-281 | 15-295 | AA778266, AI332820, T57965, AA761034, AA765224, AW001999, |
| | | | | | AW027403, AI589147, AA781723, AI055817, AI042046, AI285392, |
| | | | | | AA573478, AW304220, F21355, AW440771, AA832326, AW304290, |
| | | | | | AA922723, AI417388, AI222795, AW103932, AA032231, AA861295, |
| | | | | | AA197294, AW249478, AW362135, AI348613, AI318391, AI423193, |
| | | | | | AI204082, AA838032, AI992201, AI762824, AI034448, AI346512, |
| | | | | | AI459979, N78868, AI300015, AI568758, AI346024, N95534, AA424509, |
| | | | | | T87621, AA403210, AA079692, AA683132, T82693, AA525375, F36972, |
| | | | | | AI589253, AI362276, F32550, W24223, AA953774, AI355822, AA764943, |
| | | | | | F23590, AA617633, AA296723, F36426, AA285289, T57883, and |
| | | | | | AB028972. |
| HKMMU45 | 234 | 871759 | 1-684 | 15-698 | W31265, AI475110, AA436263, H52387, R96206, AR060643, and |
| | | | | | AJ010605. |
| HKMMR58 | 235 | 736099 | 1-300 | 15-314 | T39187. |
| HKMMJ41 | 236 | 920910 | 1-505 | 15-519 | R93764, R83166, W04900, AA206565, and R71112. |
| HKMMB27 | 237 | 575799 | 1-392 | 15-406 | AC007899. |
| HKMMB10 | 238 | 964728 | 1-376 | 15-390 | AL049835, AC003014, AB020868, AL136504, AC002395, AL050307, |
| | | | | | AL049636, AC006971, AC006581, AL035451, AL022319, AL034377, |
| | | | | | AP000510, AL035089, AL133353, AC005225, AC004386, Z92844, |
| | | | | | AC005483, AC004678, Z99128, Z85986, AC004542, AC005049, |
| | | | | | AC002425, AL050318, AL121653, AC005746, AC006362, AC005971, |
| | | | | | AC002418, AL031427, AC007686, AC006511, AL049779, AL023807, |
| | | | | | AL049540, AL109758, AL133249, AL022336, U80017, AC006040, |
| | | | | | AL022165, AC006539, AC005081, AC002420, AL121823, AC007055, |
| | | | | | AC005736, AC005755, AC005482, AC004814, AL024498, AL009181, and |
| | | | | | AC006328. |
| HKMLY45 | 239 | 575805 | 1-414 | 15-428 | |
| HKMLO33 | 240 | 859903 | 1-329 | 15-343 | AA825808, AA825795, AA825804, and AW008231. |
| HKMLM54 | 241 | 825104 | 1-392 | 15-406 | AA150384, Z43101, AA368774, AA401857, T32633, AA204673, |
| | | | | | AA470948, T34471, AI557055, AA259160, AW176688, AW408251, |
| | | | | | D63478, and AJ243670. |
| HKMLK76 | 242 | 840137 | 1-552 | 15-566 | H94820. |
| HKMLF28 | 243 | 705533 | 1-403 | 15-417 | N31007, and AA769578. |
| HKMLD21 | 244 | 671010 | 1-424 | 15-438 | N47213. |
| HKMLC74 | 245 | 765669 | 1-452 | 15-466 | AA081681. |
| HKMLC56 | 246 | 733473 | 1-278 | 15-292 | N51179, and AC005037. |
| HKMBD80 | 247 | 522402 | 1-74 | 15-88 | W95976, AI697463, AW014466, AA601222, AC005827, Z93021, L44140, |
| | | | | | AC005180, AL035551, AC000120, AL050379, AC007324, and AC005391. |
| HKMBD57 | 248 | 522406 | 1-335 | 15-349 | AA555280, R40497, AA340630, AC003012, AC003686, AC000379, and |
| | | | | | AC002312. |
| HKMBC21 | 249 | 670144 | 1-425 | 15-439 | W92845. |
| HKMBA94 | 250 | 793011 | 1-314 | 15-328 | H44491, AI820761, AI820823, R73029, AI668574, AA740672, and |
| | | | | | AC007556. |
| HKIYT69 | 251 | 843327 | 1-392 | 15-406 | AI525572, AL031228, AL121654, AF001905, and AC005303. |
| HKIYS82 | 252 | 779904 | 1-438 | 15-452 | N30552, N30560, AW069273, AA136771, AA730795, AA425283, |
| | | | | | AA601376, AA218874, AA666295, AA846944, AI446618, AL048060, |
| | | | | | F17549, AL048090, AA584360, AW089260, AW151247, AA708490, |
| | | | | | AA665411, AA483735, AA262079, AW057760, AA513582, AA528490, |
| | | | | | AA417701, AA533066, AI369977, AI003044, AA320106, M77888, |
| | | | | | AA772493, AA015948, F27846, AA505108, AI039257, AA078084, |
| | | | | | AI028148, AA676592, AI932902, AW270329, AI886434, AC005701, |
| | | | | | L47229, AL035425, AL034430, AL121603, Z97987, AL109628, M94579, |
| | | | | | AL022726, Z93020, AP000558, L47227, AL078612, AC007363, AC007546, |
| | | | | | AC005779, AL079342, AC005827, AP000694, AL139054, AC007919, |
| | | | | | AC006251, AC006511, AC009516, AC004000, AC005529, AC005666, |
| | | | | | AL033527, AC002036, AC006312, AC005393, AC004686, Z98743, |
| | | | | | AC003013, AL080243, AL033381, AC005325, AC005822, AC012627, |
| | | | | | AC007051, AL121595, AC003665, AL031121, AC006241, AC004231, |
| | | | | | Z98050, AL022324, AL035587, AC006968, AC005730, AL049694, |
| | | | | | AL049795, AL031680, AC004167, X69907, AC006166, AC007066, |
| | | | | | AC005160, AC005039, AL035445, AC007637, AJ003147, AC004859, |
| | | | | | Z98742, Z97181, AB023051, AC005755, Z73417, AC007688, Z84466, |
| | | | | | AC003029, AC004953, Z47066, AP001068, AL049843, AC005399, |
| | | | | | AC005722, AC006130, AL031294, AC002091, AL022336, U73630, |
| | | | | | AL133246, AC004472, AL117258, AC005479, AF001549, AC006582, |
| | | | | | AC004150, AP000512, AC002350, AC002314, AB003151, Z95116, |
| | | | | | AL022156, AC005015, AD000671, AC004263, Z93017, AC002470, |
| | | | | | AL031133, AL023879, AL132642, U07563, U85195, AL022318, AF165926, |
| | | | | | AL035086, AE000658, AC006468, AC005332, AB018315, AL050333, |
| | | | | | AC006581, AD000833, AC005913, AC005031, AL096707, AP000689, |
| | | | | | AL022345, AC007055, AC007899, AC006561, AC004856, U78027, |
| | | | | | AC005358, Z97056, AC006006, AB004907, AP000692, U07000, |
| | | | | | AC005004, U80017, AC005837, AC007227, AP000702, AP000703, |
| | | | | | AL035457, AC005726, AL109613, AC005234, I38891, AC004253, |
| | | | | | AP000280, AC005288, AC005387, AC004131, AC009247, AC005881, |
| | | | | | AL133448, AL031427, AC000353, AC006274, AB011399, AL049636, |
| | | | | | AC004185, Z97053, AL009181, AC005207, AC005326, AP000039, |
| | | | | | AP000107, AC006398, Z95114, AC004031, AL022721, AC003074, |
| | | | | | AC007421, AC004743, AC008372, AC007021, AL035659, AL050341, |
| | | | | | AC002097, AC000039, AL049869, AC004938, AL096701, Z95327, |
| | | | | | AC006101, AL008582, AL031311, AC006121, AL034402, AC006449, |
| | | | | | AC004893, AC005856, U50871, AC005844, AL049757, AC004998, |
| | | | | | AL035422, AF015416, AC007151, AC002366, AL031589, AC004497, |
| | | | | | AF072711, AC006369, AC005914, AP000556, AC005618, AF217403, |
| | | | | | U62317, AL135783, AC005229, AP000302, AC005391, and AC011456. |
| HKIYN76 | 253 | 770080 | 1-158 | 15-172 | AA233994, AI457263, H56018, and AI743796. |
| HKIYM14 | 254 | 658464 | 1-443 | 15-457 | R50790, AW027856, AW023560, AB007880, and AC007011. |
| HKIYL69 | 255 | 757602 | 1-374 | 15-388 | R44551, AI763301, AI298955, AA770581, AI832042, AI692426, T16755, |
| | | | | | Z41400, and F02737. |
| HKIYF03 | 256 | 924241 | 1-638 | 15-652 | W84674, AW151108, AW190029, AI588945, H16736, AA701270, R53539, |
| | | | | | H11918, R53968, Z40891, AA599662, F08905, R37016, AA658995, |
| | | | | | F04952, AC005384, and AB011106. |
| HKIYC59 | 257 | 868263 | 1-793 | 15-807 | W92350, R59008, Z45806, R25845, and R24549. |
| HKIYC29 | 258 | 725699 | 1-450 | 15-464 | AA047649, AI125839, AI872037, AA078734, N31414, AI888750, |
| | | | | | AW173398, AA291569, AW151816, AI341552, AI147369, AI862320, |
| | | | | | AI460209, H44641, AI890791, AI288302, AI214768, H27098, AI680219, |
| | | | | | H24850, AI569963, AI803398, AA863240, AI587333, AI094729, |
| | | | | | AW275815, AI569966, AI207907, AA025245, AI055872, AI683892, |
| | | | | | AI815179, T55123, AA935404, AA935951, AI760992, AA181579, |
| | | | | | AI095094, AI376224, AI446239, AI521568, AA573591, AI510822, D53868, |
| | | | | | AI936953, AI050810, AI923788, AI754186, AA532835, AI366038, |
| | | | | | AI086308, AA731469, AA026039, AI200772, AA971210, AI124087, |
| | | | | | T94904, W87621, N68630, AA351862, AA506007, AA293586, AI538601, |
| | | | | | AI023071, AI949442, AW418675, AA219074, AW132055, T31872, |
| | | | | | AA065311, AA725853, AA996363, T94859, AA401943, AA164940, |
| | | | | | AI142377, AA128692, AA515058, AA987687, W87540, AI453287, |
| | | | | | H48222, AA774750, AI708636, AA977606, AA598580, H73586, M78415, |
| | | | | | AA219073, AA040892, AA749251, AA903880, AA875848, T24684, |
| | | | | | H10339, AA223894, N80052, AW073120, AA631389, AA643905, |
| | | | | | AA205285, AA731952, AI061149, H00634, AA047663, AI380002, |
| | | | | | AI972718, AW263374, D19661, AA554760, AI422650, R09485, AA016101, |
| | | | | | AA665703, H24851, AW188764, AI718445, AI749700, AB027196, D87451, |
| | | | | | and AB026621. |
| HKIXT41 | 259 | 881507 | 1-429 | 15-443 | H08815. |
| HKIXQ80 | 260 | 775405 | 1-436 | 15-450 | |
| HKIXQ47 | 261 | 720373 | 1-461 | 15-475 | AI816841, AW303567, AA234572, AA232836, AW197490, AI700925, |
| | | | | | AA931539, AA508888, AI806376, AA234632, AA837317, AI796862, |
| | | | | | AI745150, AW149610, AW001856, and AW299388. |
| HKIXB15 | 262 | 660458 | 1-134 | 15-148 | N63346. |
| HKISB59 | 263 | 739423 | 1-430 | 15-444 | AW016452, AI091148, H06383, AI424991, AA598689, AI693507, |
| | | | | | AI863108, AA599060, R39887, AA813482, AA620528, AI364268, |
| | | | | | AI241940, AW089149, AW090733, R41807, AW088875, Z38240, |
| | | | | | AA676754, and AA121202. |
| HKISA86 | 264 | 785613 | 1-479 | 15-493 | R59058, R56277, F09135, AI688639, AW297044, AL031290, and |
| | | | | | AB006627. |
| HKIMG64 | 265 | 857190 | 1-404 | 15-418 | AA493955. |
| HKIMG03 | 266 | 924745 | 1-569 | 15-583 | AA443730, AI299674, AA043886, AI299675, AI685891, AI928142, |
| | | | | | AW381568, AI718755, AW024319, AI337229, AI760661, AI056045, |
| | | | | | AI982597, and AL021978. |
| HKIBB62 | 267 | 742526 | 1-562 | 15-576 | H00797, R79425, AI863313, and AC009509. |
| HKDBF75 | 268 | 881308 | 1-575 | 15-589 | AI928004, AI494057, AW205409, AI478645, AW300209, AI636105, |
| | | | | | AI822029, AW195364, AI365231, AW194974, AI373880, AI244760, |
| | | | | | AI792838, AI800298, AA962549, AI271782, AI792223, AI015994, |
| | | | | | AI733514, AI431716, AW242559, AI636287, AI927024, AI628447, |
| | | | | | AI927179, AW237692, AI474905, and AW242942. |
| HFKLK34 | 269 | 907556 | 1-651 | 15-665 | AA203368. |
| HFKLC10 | 270 | 963164 | 1-412 | 15-426 | AI927912, AI969307, D51799, AA305409, D80227, C15076, D59859, |
| | | | | | D80166, D80269, D81030, D51423, D59619, D80210, D80240, D80253, |
| | | | | | D50979, D80195, D58283, C14331, D80212, D80164, D80022, D80188, |
| | | | | | D59467, D80219, C14389, D80378, D80391, D59275, D57483, D59610, |
| | | | | | D80043, D59787, D59502, D80366, D59889, D59927, D80196, D80038, |
| | | | | | D50995, D80024, D80193, D80241, C14429, C75259, D51060, D80045, |
| | | | | | T03269, AW178893, C14014, D51022, D80134, AW179328, AW177440, |
| | | | | | AW378532, D81026, AA305578, AW178775, AW369651, AA514188, |
| | | | | | D51079, F13647, D51250, D80251, D80522, D80248, D58253, D80949, |
| | | | | | AA514186, D59695, D81111, AW352158, AW178762, D80168, C14298, |
| | | | | | C14227, D80064, D80133, AW177501, AI910186, AW177511, AW360811, |
| | | | | | C14407, Z21582, C05695, AI905856, D80268, AW352117, AW176467, |
| | | | | | AW375405, AW378540, D80132, AW377671, AW366296, AW360844, |
| | | | | | AW360817, AW375406, AW378534, D80302, AW179332, AW377672, |
| | | | | | AW179023, AW178905, D80439, D59373, AW360834, AA285331, |
| | | | | | AW352171, AW377676, AW178906, AW352170, AW177731, AW178907, |
| | | | | | D51097, AW179019, AW179024, D80247, AW177505, AW179020, |
| | | | | | AW360841, AI557751, AW352174, AW178909, AW177456, AW179329, |
| | | | | | AW178980, AW177733, AW378528, AW178908, AW178754, AW179018, |
| | | | | | T11417, AW179220, D51103, AW179004, D80157, AW179012, |
| | | | | | AW178914, AW367967, AW378525, D51759, AW177722, D58246, |
| | | | | | AW177728, AW179009, D58101, AW178774, AW178911, AW378543, |
| | | | | | AW352163, D80014, AW178983, D59503, AW352120, AW178781, |
| | | | | | T48593, D59627, C06015, D80258, D59653, AI525920, AW177723, |
| | | | | | D45260, C14975, T03116, AW177508, AI535850, AI557774, AW378533, |
| | | | | | AW378539, H67854, D80228, AW367950, D51213, AW177497, C03092, |
| | | | | | H67866, T02974, AA809122, D59317, AW178986, AI525923, AI525917, |
| | | | | | D45273, D51221, AW177734, D59474, D50981, C14344, C14973, |
| | | | | | AA514184, C14957, D60010, AI525925, AI535686, D59551, AI525235, |
| | | | | | AI525928, D60214, T03048, AI525912, AI525227, C14046, AI525215, |
| | | | | | AI535961, AI525242, AW378542, AI525222, C16955, Z33452, C05763, |
| | | | | | A62298, A62300, A84916, AJ132110, AR018138, X67155, Y17188, |
| | | | | | D26022, A25909, A67220, D89785, A78862, D34614, AF058696, |
| | | | | | AR008278, AB028859, D88547, X82626, AR025207, Y12724, AB012117, |
| | | | | | AR060385, A82595, X68127, A94995, AB002449, A85396, AR066482, |
| | | | | | I50128, AR008443, A44171, I50133, A85477, U87250, I19525, A86792, |
| | | | | | X93549, I50126, I50132, AR066488, AR016514, AR060138, A45456, |
| | | | | | A26615, AR052274, AR066490, Y09669, A43192, A43190, AR038669, |
| | | | | | AR066487, I18367, A30438, AR054175, D88507, I14842, D50010, Y17187, |
| | | | | | X64588, AF135125, AR008277, AR008281, A63261, AR008408, |
| | | | | | AR062872, A70867, AR016691, AR016690, U46128, D13509, A64136, |
| | | | | | A68321, AR060133, I79511, AB033111, U87247, AR064240, AB023656, |
| | | | | | U79457, AF123263, AR032065, X93535, and AR008382. |
| HFKJP91 | 271 | 836476 | 1-525 | 15-539 | AA081997, and AA285241. |
| HFKGB24 | 272 | 677402 | 1-401 | 15-415 | AA156760. |
| HFKFI85 | 273 | 589991 | 1-1175 | 15-1189 | |
| HFKFI46 | 274 | 586801 | 1-405 | 15-419 | |
| HFKEM62 | 275 | 917769 | 1-423 | 15-437 | AA463278, AW131567, AW170150, AW166143, AI332804, AW243538, |
| | | | | | W23206, AI936822, H73017, AI377689, AI219849, AI805901, AI217314, |
| | | | | | AA317712, AI421619, AA429791, H11862, AA984550, AA361590, |
| | | | | | AA600084, AA382978, AI674528, R31389, W03369, AA234327, AI095810, |
| | | | | | H83544, Z25103, N42433, AA355008, T69216, and AC005837. |
| HFKDH49 | 276 | 826803 | 1-378 | 15-392 | |
| HFKDF03 | 277 | 960977 | 1-495 | 15-509 | AA594916, and AA341585. |
| HFKDE75 | 278 | 766436 | 1-380 | 15-394 | T92523, AA341577, T91760, AP000056, AP000124, AP000171, and |
| | | | | | AP000330. |
| HFKCO51 | 279 | 725968 | 1-459 | 15-473 | AA179210, AA341233, and AC004889. |
| HFKCO02 | 280 | 917279 | 1-535 | 15-549 | AA341205, C14014, H67854, AW367950, D51423, D58283, D80038, |
| | | | | | D80022, C14331, D59275, C14389, D80247, D80043, AA305578, D80439, |
| | | | | | D51022, D59859, D80195, D80253, D80166, D80522, D59467, D59619, |
| | | | | | D80210, D51799, D80391, D80164, D80240, D59787, D80227, D59502, |
| | | | | | AA305409, D81030, D80366, D81026, D80269, D80212, D80268, D80196, |
| | | | | | D80188, D80248, D50979, D80219, D59610, D50995, D59927, D57483, |
| | | | | | C15076, D51060, D59889, C14429, D80024, D80193, D80133, D80045, |
| | | | | | AA514186, AA514188, D80157, D51103, AW360811, H67866, D80378, |
| | | | | | D80241, AW177440, D80302, D51759, D80251, AW178893, T03269, |
| | | | | | AW377671, AW375405, D45260, C75259, AW178906, AW179019, |
| | | | | | AW366296, C06015, AW360844, T48593, AW179328, AW360817, |
| | | | | | AW352170, AW375406, AA809122, AW378534, AW177731, AW179332, |
| | | | | | C05695, AW377672, AW179023, AW178905, AW177505, D59373, |
| | | | | | D59653, AW378528, AW178762, AW378532, AW179020, AW177501, |
| | | | | | AW177511, AW352171, AW377676, AW176467, AW178908, C03092, |
| | | | | | AW178907, AW179024, D51250, AW360834, AW360841, T11417, |
| | | | | | AW352120, AW178775, AW179004, AW178909, AW177456, D80014, |
| | | | | | AW179329, AW178980, AW178914, AW178774, AW177733, AW178754, |
| | | | | | AW179018, AW352158, AW352117, C14344, AW178986, AI525235, |
| | | | | | AI525923, F13647, D80258, C14973, AI525917, H67858, AW179009, |
| | | | | | AW178911, AW179012, C14077, T03116, AW378543, AW378525, |
| | | | | | AW378540, AW177722, AW352163, D80168, D58246, D81111, D59317, |
| | | | | | D51079, D60214, C14227, D59503, D51213, D80064, AW177728, D60010, |
| | | | | | AW378533, D59627, D51221, C14407, D59474, AI525920, AI557774, |
| | | | | | AW178781, AA514184, AI535686, AW177734, C14046, D58101, |
| | | | | | AI910186, D59551, C14957, AI905856, C14298, AI525227, AI557751, |
| | | | | | T02974, AW177723, AI525215, C16955, AI525242, Z33452 AI525912, |
| | | | | | AA285331, AW378542, AI525925, AW378539, D45273, AI525222, |
| | | | | | AI525237, C05763, Z21582, Z30160, AW360855, T03048, C04682, |
| | | | | | AI525228, T02868, D51053, AW369651, AI525928, C13958, D80314, |
| | | | | | T11191, D88547, A62300, AR018138, A84916, AR060385, AF058696, |
| | | | | | AR008278, AR016514, A62298, AB028859, A82595, AJ132110, |
| | | | | | AB002449, I50126, I50132, I50128, I50133, A26615, AR052274, |
| | | | | | AR060138, A45456, D50010, A43192, X67155, A43190, AR066488, |
| | | | | | Y17188, A94995, D26022, Y12724, A25909, A67220, D89785, A78862, |
| | | | | | D34614, AR008443, AR038669, Y09669, AR054175, AR066487, A30438, |
| | | | | | I14842, Y17187, D13509, X82626, A63261, AR008277, AR008281, I82448, |
| | | | | | AR062872, AR008408, A70867, X64588, AR016691, AR016690, I79511, |
| | | | | | U46128, AR025207, AR060133, A64136, A68321, AR032065, X68127, |
| | | | | | AF123263, and AR008382. |
| HFKCJ69 | 281 | 753680 | 1-336 | 15-350 | AA341194, N49338, N36753, AI148212, and AI250776. |
| HFKCJ52 | 282 | 725974 | 1-503 | 15-517 | AA486842, R68537, AA341183, T97103, AA487202, AA723375, D80566, |
| | | | | | and R68243. |
| HFKCG41 | 283 | 712718 | 1-555 | 15-569 | AI732737, AI741369, AA341070, AA428957, and AI734133. |
| HFKCC73 | 284 | 742991 | 1-318 | 15-332 | AI689230, AA340797, AI468638, R39889, AI652406, R39287, F10762, |
| | | | | | AA971179, AW075374, AI654978, AI866259, AI919420, W22264, and |
| | | | | | AI904302. |
| HFKBC11 | 285 | 967999 | 1-813 | 15-827 | W06923, AA340596, F02342, AC004520, AF191069, AF096876, |
| | | | | | AC005971, AL050307, Z93244, AC003006, AL049553, AC005702, |
| | | | | | AL035106, AP000271, AP000104, AP000032, AC006486, AC005019, |
| | | | | | AL121603, AC007262, AC004925, AC002470, and AC006208. |
| HFKBC08 | 286 | 960526 | 1-720 | 15-734 | AI792777, AI733133, AA340456, AA918869, and AW295960. |
| HCKAA51 | 287 | 534949 | 1-71 | 15-85 | AL022325, and AL031588. |
| HBAMD83 | 288 | 573369 | 1-327 | 15-341 | |
| HBAMD81 | 289 | 778176 | 1-400 | 15-414 | |
| HBAMD79 | 290 | 573373 | 1-189 | 15-203 | |
| HBAMD74 | 291 | 573372 | 1-382 | 15-396 | |
| HBAMD69 | 292 | 573371 | 1-398 | 15-412 | |
| HBAMD66 | 293 | 750532 | 1-362 | 15-376 | AI793233, AC001228, AC006600, L14561, AC004801, and AC008042. |
| HBAMD57 | 294 | 573370 | 1-361 | 15-375 | AL133224. |
| HBAMD50 | 295 | 864379 | 1-332 | 15-346 | |
| HBAMD41 | 296 | 573374 | 1-354 | 15-368 | AC008085. |
| HBAMD36 | 297 | 573367 | 1-388 | 15-402 | |
| HBAMD35 | 298 | 571354 | 1-319 | 15-333 | |
| HBAMD33 | 299 | 573365 | 1-297 | 15-311 | |
| HBAMD32 | 300 | 573362 | 1-363 | 15-377 | |
| HBAMD31 | 301 | 698280 | 1-243 | 15-257 | AL117354, and AC005519. |
| HBAMD14 | 302 | 573378 | 1-268 | 15-282 | |
| HBAMC66 | 303 | 575218 | 1-347 | 15-361 | AL134524, AL134110, AL045327, AL045328, AL038838, AI547295, |
| | | | | | AL037343, AL038983, AL037436, AL037335, AI142134, AL037323, |
| | | | | | AL044125, AL047163, AL037295, AL037443, AL037727, AL038532, |
| | | | | | AL042898, AL038761, AL043941, AL038822, AL037435, AL041347, |
| | | | | | AL040193, AL047012, AL048677, AL043923, AL043814, AL041238, |
| | | | | | AL044162, AL044186, AL040617, AL040472, AL038651, AL040576, |
| | | | | | AL040463, D29033, AL043845, AL047170, AL043496, AL044037, |
| | | | | | AI318479, AL041635, AL040294, AL043538, AL040621, AL044064, |
| | | | | | AL047219, AL041459, AL041577, AL040625, AL045684, AL041752, |
| | | | | | AL045753, AL040464, AL046850, AL040768, AL040510, AL043467, |
| | | | | | AL040052, AL045671, AL040444, AL046994, AL043677, AL040839, |
| | | | | | AL047183, AL043492, AL041602, AL046914, AL044074, AL041730, |
| | | | | | AL041523, AL043627, AL041374, AL041324, AL043848, AL043570, |
| | | | | | AL041955, AL039360, AL042135, AL046442, AL038745, AL041133, |
| | | | | | AL041098, AL040322, AL039316, AL039643, AL046392, AL040119, |
| | | | | | AL041096, AL044272, AL044258, AL041163, AL041168, AL042096, |
| | | | | | AL049018, AL041159, AL041296, AL047057, AL045920, AL038878, |
| | | | | | AL040148, AL045817, AL041086, AL041358, AL040458, AL044187, |
| | | | | | AL039432, AL041292, AL041346, U46344, AL045990, AL041142, |
| | | | | | AL040332, AL040571, AL079852, AL037341, AL040529, AL039338, |
| | | | | | AL079878, AL041197, AL046330, AL040745, AL040370, AL044274, |
| | | | | | AL040128, AL048714, AL038024, AL047036, AL048657, AL135012, |
| | | | | | AL045494, AL042523, AL037279, AL038040, AW363350, AL038041, |
| | | | | | AL042420, AL042468, AL042741, AL042655, AR066494, AJ238010, |
| | | | | | AR064707, A93923, D17247, A93916, A93931, A85203, AR023813, and |
| | | | | | AL133053. |
| HBAMC65 | 304 | 750405 | 1-371 | 15-385 | |
| HBAMC63 | 305 | 572936 | 1-400 | 15-414 | AL121823. |
| HBAMC62 | 306 | 572927 | 1-375 | 15-389 | Z80901, AC000044, and AC000034. |
| HBAMC52 | 307 | 572935 | 1-403 | 15-417 | R92238, U82672, AC005969, AC006249, AL133249, Z83827, and |
| | | | | | AL079334. |
| HBAMC51 | 308 | 572929 | 1-256 | 15-270 | |
| HBAMC42 | 309 | 572938 | 1-151 | 15-165 | |
| HBAMC35 | 310 | 571360 | 1-347 | 15-361 | |
| HBAMC34 | 311 | 572926 | 1-336 | 15-350 | |
| HBAMC23 | 312 | 572946 | 1-461 | 15-475 | |
| HBAMC05 | 313 | 932234 | 1-305 | 15-319 | AL045327, AL134524, AL038878, AL134110, AL045328, U46344, |
| | | | | | AI318479, AL047163, AL042898, AL037295, AL037436, AL038838, |
| | | | | | AL037343, AI547295, AL038983, AI142134, D29033, AL037335, |
| | | | | | AL037323, AL048677, AL038651, AL038761, AL037727, AL037443, |
| | | | | | AL038532, AL135012, AL038822, AL048657, AI547297, AL037435, |
| | | | | | AL045494, AL038745, AL042523, AL040472, AL043941, AL039432, |
| | | | | | AL047037, AL045817, AL043923, AL043814, AL045753, AL044125, |
| | | | | | AL038024, AI547292, AW363350, AL047012, AL042135, AL041238, |
| | | | | | AL044186, AL040617, AL041347, AL043845, AL038040, AL047183, |
| | | | | | AL040193, AL044162, AL037341, AL040464, AL040463, AL047219, |
| | | | | | AL047170, AL040625, AL044037, AL045684, AL041752, AL041635, |
| | | | | | AL040294, AL044064, AL041459, AL041577, AL046850, AL040768, |
| | | | | | AL045671, AL046994, AL046914, AL042420, AL042468, AL043496, |
| | | | | | AL043538, AL040621, AL040510, AL043467, AL043677, AL046442, |
| | | | | | AL040839, AL043492, AL041602, AL044074, AL041730, AL041523, |
| | | | | | AL043627, AL041374, AL043848, AL043570, AL045891, AL040052, |
| | | | | | AL038041, AI547258, AL046273, AL079852, AL045990, AL046392, |
| | | | | | AL042741, AL042655, AL039643, AI547279, AL043089, AL043321, |
| | | | | | AR066494, D17247, A93923, A93916, A93931, A85203, AL133053, |
| | | | | | AL122101, AR023813, AL133074, and AL133049. |
| HBAGW31 | 314 | 960146 | 1-1038 | 15-1052 | AI536637, N57401, AW451874, AA186627, AA155619, AA630132, |
| | | | | | AA157375, AA157874, T87885, AA157981, H75748, T78968, T87975, |
| | | | | | H75882, AA155657, T78915, and AC005632. |
| HBAGR76 | 315 | 864389 | 1-459 | 15-473 | W85958. |
| HBAGH38 | 316 | 487933 | 1-449 | 15-463 | R24932, AA808824, AL050181, and AB011090. |
| HBAFV7I | 317 | 932783 | 1-488 | 15-502 | AA421030, AI770016, AI693177, AI918036, AI338497, AA805525, |
| | | | | | AA749368, AW104323, AI932332, AI536849, N69071, AI475851, |
| | | | | | AI910707, AI628055, AI272788, R12698, AW339028, AA487625, |
| | | | | | AA101186, H41527, T23854, AW162414, AW161923, T10224, AA912188, |
| | | | | | H18616, R53452, Z39946, AA610763, AW086187, F03171, H19985, |
| | | | | | AI205478, AI638791, H92276, H41634, F02580, F01551, F02581, |
| | | | | | AW003446, H19984, H18615, AW207551, AA988910, AA932333, |
| | | | | | AI086160, AI094725, AW439925, AA365932, AW169022, AB010441, and |
| | | | | | AF106624. |
| HBAFU01 | 318 | 916248 | 1-460 | 15-474 | AA459874. |
| HBAFP29 | 319 | 690521 | 1-435 | 15-449 | H30825, AA284220, AA405396, and AA610768. |
| HBAFI04 | 320 | 615078 | 1-275 | 15-289 | R48069, AI766113, AA829235, and AI912666. |
| HBAFF55 | 321 | 753801 | 1-453 | 15-467 | AA063554, AA922507, AW451853, AI961015, AI660496, AA811829, |
| | | | | | AW295582, AW139627, AW449697, AA805067, AI742099, AW028304, |
| | | | | | AI421698, AI890848, AI498772, AI524750, AA302949, AA521445, |
| | | | | | AI142614, AI383910, R65847, AW105651, AW438961, AI497884, T90217, |
| | | | | | AA811312, AA039322, AI699283, AA936584, N80792, AA535950, |
| | | | | | AI950605, AI688529, AW205828, and R26106. |
| HBAFF09 | 322 | 926667 | 1-1100 | 15-1114 | AI222323, AW104230, AW274395, and AA917623. |
| HBAFC04 | 323 | 615472 | 1-473 | 15-487 | AA234412, and AA233482. |
| HAKAD91 | 324 | 509854 | 1-333 | 15-347 | AI148006, AA312407, and AA312378. |
| HAKAD72 | 325 | 509855 | 1-446 | 15-460 | AA312192, and AA312203. |

[0107] TABLE 4

| Code | Description | Tissue | Organ | Cell Line | Disease | Vector |
|---|---|---|---|---|---|---|
| AR022 | a_Heart | a_Heart | | | | |
| AR023 | a_Liver | a_Liver | | | | |
| AR024 | a_mammary gland | a_mammary gland | | | | |
| AR025 | a_Prostate | a_Prostate | | | | |
| AR026 | a_small intestine | a_small intestine | | | | |
| AR027 | a_Stomach | a_Stomach | | | | |
| AR028 | Blood B cells | Blood B cells | | | | |
| AR029 | Blood B cells activated | Blood B cells | | | | |
| | | activated | | | | |
| AR030 | Blood B cells resting | Blood B cells | | | | |
| | | resting | | | | |
| AR031 | Blood T cells activated | Blood T cells | | | | |
| | | activated | | | | |
| AR032 | Blood T cells resting | Blood T cells | | | | |
| | | resting | | | | |
| AR033 | brain | brain | | | | |
| AR034 | breast | breast | | | | |
| AR035 | breast cancer | breast cancer | | | | |
| AR036 | Cell Line CAOV3 | Cell Line CAOV3 | | | | |
| AR037 | cell line PA-1 | cell line PA-1 | | | | |
| AR038 | cell line transformed | cell line | | | | |
| | | transformed | | | | |
| AR039 | colon | colon | | | | |
| AR040 | colon (9808co65R) | colon (9808co65R) | | | | |
| AR041 | colon (9809co15) | colon (9809co15) | | | | |
| AR042 | colon cancer | colon cancer | | | | |
| AR043 | colon cancer | colon cancer | | | | |
| | (9808co64R) | (9808co64R) | | | | |
| AR044 | colon cancer 9809co14 | colon cancer | | | | |
| | | 9809co14 | | | | |
| AR045 | corn clone 5 | corn clone 5 | | | | |
| AR046 | corn clone 6 | corn clone 6 | | | | |
| AR047 | corn clone 2 | corn clone 2 | | | | |
| AR048 | corn clone 3 | corn clone 3 | | | | |
| AR049 | Corn Clone 4 | Corn Clone 4 | | | | |
| AR050 | Donor II B Cells 24 hrs | Donor II B Cells | | | | |
| | | 24 hrs | | | | |
| AR051 | Donor II B Cells 72 hrs | Donor II B Cells | | | | |
| | | 72 hrs | | | | |
| AR052 | Donor II B-Cells 24 hrs. | Donor II B-Cells | | | | |
| | | 24 hrs. | | | | |
| AR053 | Donor II B-Cells 72 hrs | Donor II B-Cells | | | | |
| | | 72 hrs | | | | |
| AR054 | Donor II Resting B Cells | Donor II Resting B | | | | |
| | | Cells | | | | |
| AR055 | Heart | Heart | | | | |
| AR056 | Human Lung (clonetech) | Human Lung | | | | |
| | | (clonetech) | | | | |
| AR057 | Human Mammary | Human Mammary | | | | |
| | (clontech) | (clontech) | | | | |
| AR058 | Human Thymus | Human Thymus | | | | |
| | (clonetech) | (clonetech) | | | | |
| AR059 | Jurkat (unstimulated) | Jurkat | | | | |
| | | (unstimulated) | | | | |
| AR060 | Kidney | Kidney | | | | |
| AR061 | Liver | Liver | | | | |
| AR062 | Liver (Clontech) | Liver (Clontech) | | | | |
| AR063 | Lymphocytes chronic | Lymphocytes | | | | |
| | lymphocytic leukaemia | chronic | | | | |
| | | lymphocytic | | | | |
| | | leukaemia | | | | |
| AR064 | Lymphocytes diffuse | Lymphocytes | | | | |
| | large B cell lymphoma | diffuse large B cell | | | | |
| | | lymphoma | | | | |
| AR065 | Lymphocytes follicular | Lymphocytes | | | | |
| | lymphoma | follicular | | | | |
| | | lymphoma | | | | |
| AR066 | normal breast | normal breast | | | | |
| AR067 | Normal Ovarian | Normal Ovarian | | | | |
| | (4004901) | (4004901) | | | | |
| AR068 | Normal Ovary | Normal Ovary | | | | |
| | 9508G045 | 9508G045 | | | | |
| AR069 | Normal Ovary | Normal Ovary | | | | |
| | 9701G208 | 9701G208 | | | | |
| AR070 | Normal Ovary | Normal Ovary | | | | |
| | 9806G005 | 9806G005 | | | | |
| AR071 | Ovarian Cancer | Ovarian Cancer | | | | |
| AR072 | Ovarian Cancer | Ovarian Cancer | | | | |
| | (9702G001) | (9702G001) | | | | |
| AR073 | Ovarian Cancer | Ovarian Cancer | | | | |
| | (9707G029) | (9707G029) | | | | |
| AR074 | Ovarian Cancer | Ovarian Cancer | | | | |
| | (9804G011) | (9804G011) | | | | |
| AR075 | Ovarian Cancer | Ovarian Cancer | | | | |
| | (9806G019) | (9806G019) | | | | |
| AR076 | Ovarian Cancer | Ovarian Cancer | | | | |
| | (9807G017) | (9807G017) | | | | |
| AR077 | Ovarian Cancer | Ovarian Cancer | | | | |
| | (9809G001) | (9809G001) | | | | |
| AR078 | ovarian cancer 15799 | ovarian cancer | | | | |
| | | 15799 | | | | |
| AR079 | Ovarian Cancer | Ovarian Cancer | | | | |
| | 17717AID | 17717AID | | | | |
| AR080 | Ovarian Cancer | Ovarian Cancer | | | | |
| | 4004664B1 | 4004664B1 | | | | |
| AR081 | Ovarian Cancer | Ovarian Cancer | | | | |
| | 4005315A1 | 4005315A1 | | | | |
| AR082 | ovarian cancer | ovarian cancer | | | | |
| | 94127303 | 94127303 | | | | |
| AR083 | Ovarian Cancer | Ovarian Cancer | | | | |
| | 96069304 | 96069304 | | | | |
| AR084 | Ovarian Cancer | Ovarian Cancer | | | | |
| | 9707G029 | 9707G029 | | | | |
| AR085 | Ovarian Cancer | Ovarian Cancer | | | | |
| | 9807G045 | 9807G045 | | | | |
| AR086 | ovarian cancer | ovarian cancer | | | | |
| | 9809G001 | 9809G001 | | | | |
| AR087 | Ovarian Cancer | Ovarian Cancer | | | | |
| | 9905C032RC | 9905C032RC | | | | |
| AR088 | Ovarian cancer | Ovarian cancer | | | | |
| | 9907C00 3rd | 9907 C00 3rd | | | | |
| AR089 | Prostate | Prostate | | | | |
| AR090 | Prostate (clonetech) | Prostate | | | | |
| | | (clonetech) | | | | |
| AR091 | prostate cancer | prostate cancer | | | | |
| AR092 | prostate cancer #15176 | prostate cancer | | | | |
| | | #15176 | | | | |
| AR093 | prostate cancer #15509 | prostate cancer | | | | |
| | | #15509 | | | | |
| AR094 | prostate cancer #15673 | prostate cancer | | | | |
| | | #15673 | | | | |
| AR095 | Small Intestine | Small Intestine | | | | |
| | (Clontech) | (Clontech) | | | | |
| AR096 | Spleen | Spleen | | | | |
| AR097 | Thymus T cells activated | Thymus T cells | | | | |
| | | activated | | | | |
| AR098 | Thymus T cells resting | Thymus T cells | | | | |
| | | resting | | | | |
| AR099 | Tonsil | Tonsil | | | | |
| AR100 | Tonsil geminal center | Tonsil geminal | | | | |
| | centroblast | center centroblast | | | | |
| AR101 | Tonsil germinal center B | Tonsil germinal | | | | |
| | cell | center B cell | | | | |
| AR102 | Tonsil lymph node | Tonsil lymph node | | | | |
| AR103 | Tonsil memory B cell | Tonsil memory B | | | | |
| | | cell | | | | |
| AR104 | Whole Brain | Whole Brain | | | | |
| AR105 | Xenograft ES-2 | Xenograft ES-2 | | | | |
| AR106 | Xenograft SW626 | Xenograft SW626 | | | | |
| H0011 | Human Fetal Kidney | Human Fetal | Kidney | | | Uni-ZAP |
| | | Kidney | | | | XR |
| H0012 | Human Fetal Kidney | Human Fetal | Kidney | | | Uni-ZAP |
| | | Kidney | | | | XR |
| H0053 | Human Adult Kidney | Human Adult | Kidney | | | Uni-ZAP |
| | | Kidney | | | | XR |
| H0119 | Human Pediatric Kidney | Human Pediatric | Kidney | | | Uni-ZAP |
| | | Kidney | | | | XR |
| H0239 | Human Kidney Tumor | Human Kidney | Kidney | | disease | Uni-ZAP |
| | | Tumor | | | | XR |
| H0334 | Kidney cancer | Kidney Cancer | Kidney | | disease | Uni-ZAP |
| | | | | | | XR |
| H0356 | Human Kidney | Human Kidney | Kidney | | | pCMVSport1 |
| H0361 | Human rejected kidney | Human Rejected | | | disease | pBluescript |
| | | Kidney | | | | |
| H0399 | Human Kidney Cortex, | Human Kidney | | | | Lambda |
| | re-rescue | Cortex | | | | ZAP II |
| H0408 | Human kidney Cortex, | Human Kidney | | | | pBluescript |
| | subtracted | Cortex | | | | |
| H0410 | H. Male bladder, adult | H Male Bladder, | Bladder | | | pSport1 |
| | | Adult | | | | |
| H0411 | H Female Bladder, | Human Female | Bladder | | | pSport1 |
| | Adult | Adult Bladder | | | | |
| H0431 | H. Kidney Medulla, re- | Kidney medulla | Kidney | | | pBluescript |
| | excision | | | | | |
| H0441 | H. Kidney Cortex, | Kidney cortex | Kidney | | | pBluescript |
| | subtracted | | | | | |
| H0453 | H. Kidney Pyramid, | Kidney pyramids | Kidney | | | pBluescript |
| | subtracted | | | | | |
| H0461 | H. Kidney Medulla, | Kidney medulla | Kidney | | | pBluescript |
| | subtracted | | | | | |
| H0555 | Rejected Kidney, lib 4 | Human Rejected | Kidney | | disease | pCMVSport |
| | | Kidney | | | | 3.0 |
| H0620 | Human Fetal Kidney; | Human Fetal | Kidney | | | Uni-ZAP |
| | Reexcision | Kidney | | | | XR |
| S0015 | Kidney medulla | Kidney medulla | Kidney | | | Uni-ZAP |
| | | | | | | XR |
| S0023 | Human Kidney Cortex - | Human Kidney | | | | |
| | unamplified | Cortex | | | | |
| S0024 | Human Kidney Medulla - | Human Kidney | | | | |
| | unamplified | Medulla | | | | |
| S0025 | Human Kidney | Human Kidney | | | | |
| | Pyramids - unamplified | Pyramids | | | | |
| S0288 | 7TMCTK (Kidney) | 7TMCTK | Brain | | | PCRII |
| | | (Kidney) | | | | |
| L0005 | Clontech human aorta | | | | | |
| | polyA + mRNA (#6572) | | | | | |
| L0163 | Human heart cDNA | | heart | | | |
| | (YNakamura) | | | | | |
| L0366 | Stratagene schizo brain | schizophrenic | | | | Bluescript |
| | S11 | brain S-11 frontal | | | | SK- |
| | | lobe | | | | |
| L0369 | NCI_CGAP_AA1 | adrenal adenoma | adrenal | | | Bluescript |
| | | | gland | | | SK- |
| L0373 | NCI_CGAP_Co11 | tumor | colon | | | Bluescript |
| | | | | | | SK- |
| L0435 | Infant brain, LLNL array | | | | | lafmid BA |
| | of Dr M Soares 1NIB | | | | | |
| L0438 | normalized infant brain | total brain | brain | | | lafmid BA |
| | cDNA | | | | | |
| L0439 | Soares infant brain 1NIB | | whole brain | | | Lafmid BA |
| L0471 | Human fetal heart, | | | | | Lambda |
| | Lambda ZAP Express | | | | | ZAP |
| | | | | | | Express |
| L0475 | KG1-a Lambda Zap | | | KG1-a | | Lambda Zap |
| | Express cDNA library | | | | | Express |
| | | | | | | (Stratagene) |
| L0485 | STRATAGENE Human | skeletal muscle | leg muscle | | | Lambda |
| | skeletal muscle cDNA | | | | | ZAPII |
| | library, cat. #936215 | | | | | |
| L0517 | NCI_CGAP_Pr1 | | | | | pAMP10 |
| L0518 | NCI_CGAP_Pr2 | | | | | pAMP10 |
| L0519 | NCI_CGAP_Pr3 | | | | | pAMP10 |
| L0520 | NCI_CGAP_Alv1 | alveolar | | | | pAMP10 |
| | | rhabdomyosarcoma | | | | |
| L0521 | NCI_CGAP_Ew1 | Ewing's sarcoma | | | | pAMP10 |
| L0527 | NCI_CGAP_Ov2 | ovary | | | | pAMP10 |
| L0529 | NCI_CGAP_Pr6 | prostate | | | | pAMP10 |
| L0532 | NCI_CGAP_Thy1 | thyroid | | | | pAMP10 |
| L0536 | NCI_CGAP_Br4 | normal ductal | breast | | | pAMP10 |
| | | tissue | | | | |
| L0542 | NCI_CGAP_Pr11 | normal prostatic | prostate | | | pAMP10 |
| | | epithelial cells | | | | |
| L0565 | Normal Human | Bone | Hip | | | pBluescript |
| | Trabecular Bone Cells | | | | | |
| L0591 | Stratagene HeLa cell s3 | | | | | pBluescript |
| | 937216 | | | | | SK- |
| L0592 | Stratagene hNT neuron | | | | | pBluescript |
| | (#937233) | | | | | SK- |
| L0594 | Stratagene | | | | | pBluescript |
| | neuroepithelium | | | | | SK- |
| | NT2RAMI 937234 | | | | | |
| L0595 | Stratagene NT2 neuronal | neuroepithelial | brain | | | pBluescript |
| | precursor 937230 | cells | | | | SK- |
| L0596 | Stratagene colon | | colon | | | pBluescript |
| | (#937204) | | | | | SK- |
| L0597 | Stratagene corneal | | cornea | | | pBluescript |
| | stroma (#937222) | | | | | SK- |
| L0598 | Morton Fetal Cochlea | cochlea | ear | | | pBluescript |
| | | | | | | SK- |
| L0599 | Stratagene lung | | lung | | | pBluescript |
| | (#937210) | | | | | SK- |
| L0600 | Weizmann Olfactory | olfactory | nose | | | pBluescript |
| | Epithelium | epithelium | | | | SK- |
| L0601 | Stratagene pancreas | | pancreas | | | pBluescript |
| | (#937208) | | | | | SK- |
| L0603 | Stratagene placenta | | placenta | | | pBluescript |
| | (#937225) | | | | | SK- |
| L0605 | Stratagene fetal spleen | fetal spleen | spleen | | | pBluescript |
| | (#937205) | | | | | SK- |
| L0643 | NCI_CGAP_Co19 | moderately | colon | | | pCMV- |
| | | differentiated | | | | SPORT6 |
| | | adenocarcinoma | | | | |
| L0651 | NCI_CGAP_Kid8 | renal cell tumor | kidney | | | pCMV- |
| | | | | | | SPORT6 |
| L0662 | NCI_CGAP_Gas4 | poorly | stomach | | | pCMV- |
| | | differentiated | | | | SPORT6 |
| | | adenocarcinoma | | | | |
| | | with signet r | | | | |
| L0666 | NCI_CGAP_Ut1 | well-differentiated | uterus | | | pCMV- |
| | | endometrial | | | | SPORT6 |
| | | adenocarcinoma, 7 | | | | |
| L0717 | Gessler Wilms tumor | | | | | pSPORT1 |
| L0731 | Soares_pregnant_uterus_{—} | | uterus | | | pT7T3-Pac |
| | NbHPU | | | | | |
| L0740 | Soares melanocyte | melanocyte | | | | pT7T3D |
| | 2NbHM | | | | | (Pharmacia) |
| | | | | | | with a |
| | | | | | | modified |
| | | | | | | polylinker |
| L0742 | Soares adult brain | | brain | | | pT7T3D |
| | N2b5HB55Y | | | | | (Pharmacia) |
| | | | | | | with a |
| | | | | | | modified |
| | | | | | | polylinker |
| L0743 | Soares breast 2NbHBst | | breast | | | pT7T3D |
| | | | | | | (Pharmacia) |
| | | | | | | with a |
| | | | | | | modified |
| | | | | | | polylinker |
| L0744 | Soares breast 3NbHBst | | breast | | | pT7T3D |
| | | | | | | (Pharmacia) |
| | | | | | | with a |
| | | | | | | modified |
| | | | | | | polylinker |
| L0745 | Soares retina N2b4HR | retina | eye | | | pT7T3D |
| | | | | | | (Pharmacia) |
| | | | | | | with a |
| | | | | | | modified |
| | | | | | | polylinker |
| L0746 | Soares retina N2b5HR | retina | eye | | | pT7T3D |
| | | | | | | (Pharmacia) |
| | | | | | | with a |
| | | | | | | modified |
| | | | | | | polylinker |
| L0747 | Soares_fetal_heart_NbH | | heart | | | pT7T3D |
| | H19W | | | | | (Pharmacia) |
| | | | | | | with a |
| | | | | | | modified |
| | | | | | | polylinker |
| L0748 | Soares fetal liver spleen | | Liver and | | | pT7T3D |
| | 1NFLS | | Spleen | | | (Pharmacia) |
| | | | | | | with a |
| | | | | | | modified |
| | | | | | | polylinker |
| L0749 | Soares_fetal_liver_spleen_{—} | | Liver and | | | pT7T3D |
| | 1NFLS_S1 | | Spleen | | | (Pharmacia) |
| | | | | | | with a |
| | | | | | | modified |
| | | | | | | polylinker |
| L0750 | Soares_fetal_lung_NbH | | lung | | | pT7T3D |
| | L19W | | | | | (Pharmacia) |
| | | | | | | with a |
| | | | | | | modified |
| | | | | | | polylinker |
| L0751 | Soares ovary tumor | ovarian tumor | ovary | | | pT7T3D |
| | NbHOT | | | | | (Pharmacia) |
| | | | | | | with a |
| | | | | | | modified |
| | | | | | | polylinker |
| L0752 | Soares_parathyroid_tumor_{—} | parathyroid tumor | parathyroid | | | pT7T3D |
| | NbHPA | | gland | | | (Pharmacia) |
| | | | | | | with a |
| | | | | | | modified |
| | | | | | | polylinker |
| L0753 | Soares_pineal_gland_N3 | | pineal | | | pT7T3D |
| | HPG | | gland | | | (Pharmacia) |
| | | | | | | with a |
| | | | | | | modified |
| | | | | | | polylinker |
| L0754 | Soares placenta Nb2HP | | placenta | | | pT7T3D |
| | | | | | | (Pharmacia) |
| | | | | | | with a |
| | | | | | | modified |
| | | | | | | polylinker |
| L0755 | Soares_placenta_8to9weeks_{—} | | placenta | | | pT7T3D |
| | 2NbHP8to9W | | | | | (Pharmacia) |
| | | | | | | with a |
| | | | | | | modified |
| | | | | | | polylinker |
| L0756 | Soares_multiple_sclerosis_{—} | multiple sclerosis | | | | pT7T3D |
| | 2NbHMSP | lesions | | | | (Pharmacia) |
| | | | | | | with a |
| | | | | | | modified |
| | | | | | | polylinker |
| | | | | | | V_TYPE |
| L0758 | Soares_testis_NHT | | | | | pT7T3D-Pac |
| | | | | | | (Pharmacia) |
| | | | | | | with a |
| | | | | | | modified |
| | | | | | | polylinker |
| L0759 | Soares_total_fetus_Nb2 | | | | | pT7T3D-Pac |
| | HF8_9w | | | | | (Pharmacia) |
| | | | | | | with a |
| | | | | | | modified |
| | | | | | | polylinker |
| L0761 | NCI_CGAP_CLL1 | B-cell, chronic | | | | pT7T3D-Pac |
| | | lymphotic | | | | (Pharmacia) |
| | | leukemia | | | | with a |
| | | | | | | modified |
| | | | | | | polylinker |
| L0763 | NCI_CGAP_Br2 | breast | | | | pT7T3D-Pac |
| | | | | | | (Pharmacia) |
| | | | | | | with a |
| | | | | | | modified |
| | | | | | | polylinker |
| L0764 | NCI_CGAP_Co3 | colon | | | | pT7T3D-Pac |
| | | | | | | (Pharmacia) |
| | | | | | | with a |
| | | | | | | modified |
| | | | | | | polylinker |
| L0766 | NCI_CGAP_GCB1 | germinal center B | | | | pT7T3D-Pac |
| | | cell | | | | (Pharmacia) |
| | | | | | | with a |
| | | | | | | modified |
| | | | | | | polylinker |
| L0768 | NCI_CGAP_GC4 | pooled germ cell | | | | pT7T3D-Pac |
| | | tumors | | | | (Pharmacia) |
| | | | | | | with a |
| | | | | | | modified |
| | | | | | | polylinker |
| L0769 | NCI_CGAP_Brn25 | anaplastic | brain | | | pT7T3D-Pac |
| | | oligodendroglioma | | | | (Pharmacia) |
| | | | | | | with a |
| | | | | | | modified |
| | | | | | | polylinker |
| L0770 | NCI_CGAP_Brn23 | glioblastoma | brain | | | pT7T3D-Pac |
| | | (pooled) | | | | (Pharmacia) |
| | | | | | | with a |
| | | | | | | modified |
| | | | | | | polylinker |
| L0774 | NCI_CGAP_Kid3 | | kidney | | | pT7T3D-Pac |
| | | | | | | (Pharmacia) |
| | | | | | | with a |
| | | | | | | modified |
| | | | | | | polylinker |
| L0775 | NCI_CGAP_Kid5 | 2 pooled tumors | kidney | | | pT7T3D-Pac |
| | | (clear cell type) | | | | (Pharmacia) |
| | | | | | | with a |
| | | | | | | modified |
| | | | | | | polylinker |
| L0776 | NCI_CGAP_Lu5 | carcinoid | lung | | | pT7T3D-Pac |
| | | | | | | (Pharmacia) |
| | | | | | | with a |
| | | | | | | modified |
| | | | | | | polylinker |
| L0777 | Soares_NhHMPu_S1 | Pooled human | mixed (see | | | pT7T3D-Pac |
| | | melanocyte, fetal | below) | | | (Pharmacia) |
| | | heart, and pregnant | | | | with a |
| | | | | | | modified |
| | | | | | | polylinker |
| L0779 | Soares_NFL_T_GBC_S1 | | pooled | | | pT7T3D-Pac |
| | | | | | | (Pharmacia) |
| | | | | | | with a |
| | | | | | | modified |
| | | | | | | polylinker |
| L0783 | NCI_CGAP_Pr22 | normal prostate | prostate | | | pT7T3D-Pac |
| | | | | | | (Pharmacia) |
| | | | | | | with a |
| | | | | | | modified |
| | | | | | | polylinker |
| L0789 | NCI_CGAP_Sub3 | | | | | pT7T3D-Pac |
| | | | | | | (Pharmacia) |
| | | | | | | with a |
| | | | | | | modified |
| | | | | | | polylinker |
| L0794 | NCI_CGAP_GC6 | pooled germ cell | | | | pT7T3D-Pac |
| | | tumors | | | | (Pharmacia) |
| | | | | | | with a |
| | | | | | | modified |
| | | | | | | polylinker |
| L0803 | NCI_CGAP_Kid11 | | kidney | | | pT7T3D-Pac |
| | | | | | | (Pharmacia) |
| | | | | | | with a |
| | | | | | | modified |
| | | | | | | polylinker |
| L0805 | NCI_CGAP_Lu24 | carcinoid | lung | | | pT7T3D-Pac |
| | | | | | | (Pharmacia) |
| | | | | | | with a |
| | | | | | | modified |
| | | | | | | polylinker |
| L0806 | NCI_CGAP_Lu19 | squamous cell | lung | | | pT7T3D-Pac |
| | | carcinoma, poorly | | | | (Pharmacia) |
| | | differentiated (4 | | | | with a |
| | | | | | | modified |
| | | | | | | polylinker |
| L0809 | NCI_CGAP_Pr28 | | prostate | | | pT7T3D-Pac |
| | | | | | | (Pharmacia) |
| | | | | | | with a |
| | | | | | | modified |
| | | | | | | polylinker |

[0108] TABLE 5

| OMIM | |
|---|---|
| Reference | Description |
| 107777 | Diabetes insipidus, nephrogenic, autosomal recessive, 222000 |
| 108725 | Atherosclerosis, susceptibility to |
| 120700 | C3 deficiency |
| 123940 | White sponge nevus, 193900 |
| 133171 | [Erythrocytosis, familial], 133100 |
| 136836 | Fucosyltransferase-6 deficiency |
| 139350 | Epidermolytic hyperkeratosis, 113800 |
| 139350 | Keratoderma, palmoplantar, nonepidermolytic |
| 145981 | Hypocalciuric hypercalcemia, type II |
| 147141 | Leukemia, acute lymphoblastic |
| 148040 | Epidermolysis bullosa simplex, Koebner, Dowling-Meara, and |
| | Weber-Cockayne types, 131900, 131760, 131800 |
| 148041 | Pachyonychia congenita, |
| | Jadassohn-Lewandowsky type, 167200 |
| 148043 | Meesmann corneal dystrophy, 122100 |
| 148070 | Liver disease, susceptibility to, from hepatotoxins or viruses |
| 164953 | Liposarcoma |
| 177070 | Spherocytosis, hereditary, Japanese type |
| 177070 | Hermansky-Pudlak syndrome, 203300 |
| 182500 | Cataract, congenital |
| 188070 | Bleeding disorder due to defective thromboxane A2 receptor |
| 203800 | Alstrom syndrome |
| 218000 | Andermann syndrome |
| 227220 | [Eye color, brown] |
| 229600 | Fructose intolerance |
| 231550 | Achalasia-addisonianism-alacrimia syndrome |
| 243500 | Isovalericacidemia |
| 264300 | Pseudohermaphroditism, male, with gynecomastia |
| 600194 | Ichthyosis bullosa of Siemens, 146800 |
| 600231 | Palmoplantar keratoderma, Bothnia type |
| 600536 | Myopathy, congenital |
| 600542 | Chondrosarcoma, extraskeletal myxoid |
| 600808 | Enuresis, nocturnal, 2 |
| 600839 | Bartter syndrome, 241200 |
| 600956 | Persistent Mullerian duct syndrome, type II, 261550 |
| 600957 | Persistent Mullerian duct syndrome, type I, 261550 |
| 601238 | Cerebellar ataxia, Cayman type |
| 601284 | Hereditary hemorrhagic telangiectasia-2, 600376 |
| 601769 | Osteoporosis, involutional |
| 601769 | Rickets, vitamin D-resistant, 277440 |
| 601800 | [Hair color, brown] |
| 601846 | Muscular dystrophy with rimmed vacuoles |
| 601928 | Monilethrix, 158000 |
| 602014 | Hypomagnesemia with secondary hypocalcemia |
| 602088 | Nephronophthisis, infantile |
| 602116 | Glioma |
| 602153 | Monilethrix, 158000 |
| 602216 | Peutz-Jeghers syndrome, 175200 |
| 602404 | Parkinson disease, type 3 |
| 602477 | Febrile convulsions, familial, 2 |

[0109] Polynucleotide and Polypeptide Variants

[0110] The present invention is also directed to variants of the excretory system associated polynucleotide sequence disclosed in SEQ ID NO: X or the complementary strand thereto, nucleotide sequences encoding the polypeptide of SEQ ID NO: Y, the nucleotide sequence of SEQ ID NO: X encoding the polypeptide sequence as defined in column 6 of Table 1A, nucleotide sequences encoding the polypeptide as defined in column 6 of Table 1A, the nucleotide sequence as defined in columns 8 and 9 of Table 2, nucleotide sequences encoding the polypeptide encoded by the nucleotide sequence as defined in columns 8 and 9 of Table 2, the nucleotide sequence as defined in column 6 of Table 1B, nucleotide sequences encoding the polypeptide encoded by the nucleotide sequence as defined in column 6 of Table 1B, the cDNA sequence contained in Clone ID NO: Z, and/or nucleotide sequences encoding a polypeptide encoded by the cDNA sequence contained in Clone ID NO: Z.

[0111] The present invention also encompasses variants of the polypeptide sequence disclosed in SEQ ID NO: Y, a polypeptide sequence as defined in column 6 of Table 1A, a polypeptide sequence encoded by the polynucleotide sequence in SEQ ID NO: X, a polypeptide sequence encoded by the nucleotide sequence as defined in columns 8 and 9 of Table 2, a polypeptide sequence encoded by the nucleotide sequence as defined in column 6 of Table 1B, a polypeptide sequence encoded by the complement of the polynucleotide sequence in SEQ ID NO: X, and/or a polypeptide sequence encoded by the cDNA sequence contained in Clone ID NO: Z.

[0112] “Variant” refers to a polynucleotide or polypeptide differing from the polynucleotide or polypeptide of the present invention, but retaining essential properties thereof. Generally, variants are overall closely similar, and, in many regions, identical to the polynucleotide or polypeptide of the present invention.

[0113] Thus, one aspect of the invention provides an isolated nucleic acid molecule comprising, or alternatively consisting of, a polynucleotide having a nucleotide sequence selected from the group consisting of: (a) a nucleotide sequence described in SEQ ID NO: X or contained in the cDNA sequence of Clone ID NO: Z; (b) a nucleotide sequence in SEQ ID NO: X or the cDNA in Clone ID NO: Z which encodes a mature excretory system associated polypeptide; (c) a nucleotide sequence in SEQ ID NO: X or the cDNA sequence of Clone ID NO: Z, which encodes a biologically active fragment of an excretory system associated polypeptide; (d) a nucleotide sequence in SEQ ID NO: X or the cDNA sequence of Clone ID NO: Z, which encodes an antigenic fragment of an excretory system associated polypeptide; (e) a nucleotide sequence encoding an excretory system associated polypeptide having the complete amino acid sequence of SEQ ID NO: Y or the complete amino acid sequence encoded by the cDNA in Clone ID NO: Z; (f) a nucleotide sequence encoding a mature excretory system associated polypeptide of the amino acid sequence of SEQ ID NO: Y or the amino acid sequence encoded by the cDNA in Clone ID NO: Z; (g) a nucleotide sequence encoding a biologically active fragment of an excretory system associated polypeptide having the complete amino acid sequence of SEQ ID NO: Y or the complete amino acid sequence encoded by the cDNA in Clone ID NO: Z; (h) a nucleotide sequence encoding an antigenic fragment of an excretory system associated polypeptide having the complete amino acid sequence of SEQ ID NO: Y or the complete amino acid sequence encoded by the cDNA in Clone ID NO: Z; and (i) a nucleotide sequence complementary to any of the nucleotide sequences in (a), (b), (c), (d), (e), (f), (g), or (h), above.

[0114] The present invention is also directed to nucleic acid molecules which comprise, or alternatively consist of, a nucleotide sequence which is at least 80%, 85%, 90%, 95%, 96%, 97%, 98%, 99% or 100%, identical to, for example, any of the nucleotide sequences in (a), (b), (c), (d), (e), (f), (g), (h), or (i) above, the nucleotide coding sequence in SEQ ID NO: X or the complementary strand thereto, the nucleotide coding sequence of the cDNA contained in Clone ID NO: Z or the complementary strand thereto, a nucleotide sequence encoding the polypeptide of SEQ ID NO: Y, a nucleotide sequence encoding a polypeptide sequence encoded by the nucleotide sequence in SEQ ID NO: X, a polypeptide sequence encoded by the complement of the polynucleotide sequence in SEQ ID NO: X, a nucleotide sequence encoding the polypeptide encoded by the cDNA contained in Clone ID NO: Z, the nucleotide coding sequence in SEQ ID NO: X as defined in columns 8 and 9 of Table 2 or the complementary strand thereto, a nucleotide sequence encoding the polypeptide encoded by the nucleotide sequence in SEQ ID NO: X as defined in columns 8 and 9 of Table 2 or the complementary strand thereto, the nucleotide coding sequence in SEQ ID NO: B as defined in column 6 of Table 1B or the complementary strand thereto, a nucleotide sequence encoding the polypeptide encoded by the nucleotide sequence in SEQ ID NO: B as defined in column 6 of Table 1B or the complementary strand thereto, the nucleotide sequence in SEQ ID NO: X encoding the polypeptide sequence as defined in column 6 of Table 1A or the complementary strand thereto, nucleotide sequences encoding a polypeptide as defined in column 6 of Table 1A or the complementary strand thereto, and/or polynucleotide fragments of any of these nucleic acid molecules (e.g., those fragments described herein). Polynucleotides which hybridize to the complement of these nucleic acid molecules under stringent hybridization conditions or alternatively, under lower stringency conditions, are also encompassed by the invention, as are polypeptides encoded by these polynucleotides and nucleic acids.

[0115] In a preferred embodiment, the invention encompasses nucleic acid molecules which comprise, or alternatively, consist of a polynucleotide which hybridizes under stringent hybridization conditions, or alternatively, under lower stringency conditions, to a polynucleotide in (a), (b), (c), (d), (e), (f), (g), (h), or (i) above, as are polypeptides encoded by these polynucleotides. In another preferred embodiment, polynucleotides which hybridize to the complement of these nucleic acid molecules under stringent hybridization conditions or alternatively, under lower stringency conditions, are also encompassed by the invention, as are polypeptides encoded by these polynucleotides.

[0116] In another embodiment, the invention provides a purified protein comprising, or alternatively consisting of, a polypeptide having an amino acid sequence selected from the group consisting of: (a) the complete amino acid sequence of SEQ ID NO: Y or the complete amino acid sequence encoded by the cDNA in Clone ID NO: Z; (b) the amino acid sequence of a mature excretory system associated polypeptide having the amino acid sequence of SEQ ID NO: Y or the amino acid sequence encoded by the cDNA in Clone ID NO: Z; (c) the amino acid sequence of a biologically active fragment of an excretory system associated polypeptide having the complete amino acid sequence of SEQ ID NO: Y or the complete amino acid sequence encoded by the cDNA in Clone ID NO: Z; and (d) the amino acid sequence of an antigenic fragment of an excretory system associated polypeptide having the complete amino acid sequence of SEQ ID NO: Y or the complete amino acid sequence encoded by the cDNA in Clone ID NO: Z.

[0117] The present invention is also directed to proteins which comprise, or alternatively consist of, an amino acid sequence which is at least 80%, 85%, 90%, 95%, 96%, 97%, 98%, 99% or 100%, identical to, for example, any of the amino acid sequences in (a), (b), (c), or (d), above, the amino acid sequence shown in SEQ ID NO: Y, the amino acid sequence encoded by the cDNA contained in Clone ID NO: Z, the amino acid sequence of the polypeptide encoded by the nucleotide sequence in SEQ ID NO: X as defined in columns 8 and 9 of Table 2, the amino acid sequence of the polypeptide encoded by the nucleotide sequence in SEQ ID NO: B as defined in column 6 of Table 1B, the amino acid sequence as defined in column 6 of Table 1A, an amino acid sequence encoded by the nucleotide sequence in SEQ ID NO: X, and an amino acid sequence encoded by the complement of the polynucleotide sequence in SEQ ID NO: X. Fragments of these polypeptides are also provided (e.g., those fragments described herein). Further proteins encoded by polynucleotides which hybridize to the complement of the nucleic acid molecules encoding these amino acid sequences under stringent hybridization conditions or alternatively, under lower stringency conditions, are also encompassed by the invention, as are the polynucleotides encoding these proteins.

[0118] By a nucleic acid having a nucleotide sequence at least, for example, 95% “identical” to a reference nucleotide sequence of the present invention, it is intended that the nucleotide sequence of the nucleic acid is identical to the reference sequence except that the nucleotide sequence may include up to five point mutations per each 100 nucleotides of the reference nucleotide sequence encoding the polypeptide. In other words, to obtain a nucleic acid having a nucleotide sequence at least 95% identical to a reference nucleotide sequence, up to 5% of the nucleotides in the reference sequence may be deleted or substituted with another nucleotide, or a number of nucleotides up to 5% of the total nucleotides in the reference sequence may be inserted into the reference sequence. The query sequence may be an entire sequence referred to in Table 1A or 2 as the ORF (open reading frame), or any fragment specified, as described herein.

[0119] As a practical matter, whether any particular nucleic acid molecule or polypeptide is at least 80%, 85%, 90%, 95%, 96%, 97%, 98% or 99% identical to a nucleotide sequence of the present invention can be determined conventionally using known computer programs. A preferred method for determining the best overall match between a query sequence (a sequence of the present invention) and a subject sequence, also referred to as a global sequence alignment, can be determined using the FASTDB computer program based on the algorithm of Brutlag et al. (Comp. App. Biosci. 6:237-245 (1990)). In a sequence alignment the query and subject sequences are both DNA sequences. An RNA sequence can be compared by converting U's to T's. The result of said global sequence alignment is expressed as percent identity. Preferred parameters used in a FASTDB alignment of DNA sequences to calculate percent identity are: Matrix=Unitary, k-tuple=4, Mismatch Penalty=1, Joining Penalty=30, Randomization Group Length=0, Cutoff Score=1, Gap Penalty=5, Gap Size Penalty 0.05, Window Size=500 or the length of the subject nucleotide sequence, whichever is shorter.

[0120] If the subject sequence is shorter than the query sequence because of 5′ or 3′ deletions, not because of internal deletions, a manual correction must be made to the results. This is because the FASTDB program does not account for 5′ and 3′ truncations of the subject sequence when calculating percent identity. For subject sequences truncated at the 5′ or 3′ ends, relative to the query sequence, the percent identity is corrected by calculating the number of bases of the query sequence that are 5′ and 3′ of the subject sequence, which are not matched/aligned, as a percent of the total bases of the query sequence. Whether a nucleotide is matched/aligned is determined by results of the FASTDB sequence alignment. This percentage is then subtracted from the percent identity, calculated by the above FASTDB program using the specified parameters, to arrive at a final percent identity score. This corrected score is what is used for the purposes of the present invention. Only bases outside the 5′ and 3′ bases of the subject sequence, as displayed by the FASTDB alignment, which are not matched/aligned with the query sequence, are calculated for the purposes of manually adjusting the percent identity score.

[0121] For example, a 90 base subject sequence is aligned to a 100 base query sequence to determine percent identity. The deletions occur at the 5′ end of the subject sequence and therefore, the FASTDB alignment does not show a matched/alignment of the first 10 bases at 5′ end. The 10 unpaired bases represent 10% of the sequence (number of bases at the 5′ and 3′ ends not matched/total number of bases in the query sequence) so 10% is subtracted from the percent identity score calculated by the FASTDB program. If the remaining 90 bases were perfectly matched the final percent identity would be 90%. In another example, a 90 base subject sequence is compared with a 100 base query sequence. This time the deletions are internal deletions so that there are no bases on the 5′ or 3′ of the subject sequence which are not matched/aligned with the query. In this case the percent identity calculated by FASTDB is not manually corrected. Once again, only bases 5′ and 3′ of the subject sequence which are not matched/aligned with the query sequence are manually corrected for. No other manual corrections are to made for the purposes of the present invention.

[0122] By a polypeptide having an amino acid sequence at least, for example, 95% “identical” to a query amino acid sequence of the present invention, it is intended that the amino acid sequence of the subject polypeptide is identical to the query sequence except that the subject polypeptide sequence may include up to five amino acid alterations per each 100 amino acids of the query amino acid sequence. In other words, to obtain a polypeptide having an amino acid sequence at least 95% identical to a query amino acid sequence, up to 5% of the amino acid residues in the subject sequence may be inserted, deleted, (indels) or substituted with another amino acid. These alterations of the reference sequence may occur at the amino or carboxy terminal positions of the reference amino acid sequence or anywhere between those terminal positions, interspersed either individually among residues in the reference sequence or in one or more contiguous groups within the reference sequence.

[0123] As a practical matter, whether any particular polypeptide is at least 80%, 85%, 90%, 95%, 96%, 97%, 98% or 99% identical to, for instance, the amino acid sequence of a polypeptide referred to in Table 1A (e.g., an amino acid sequence identified in columns 5 or 6) or Table 2 (e.g., the amino acid sequence of the polypeptide encoded by the polynucleotide sequence defined in columns 8 and 9 of Table 2) or a fragment thereof, the amino acid sequence of the polypeptide encoded by the polynucleotide sequence in SEQ ID NO: B as defined in column 6 of Table 1B or a fragment thereof, the amino acid sequence of the polypeptide encoded by the nucleotide sequence in SEQ ID NO: X or a fragment thereof, or an amino acid sequence of the polypeptide encoded by cDNA contained in Clone ID NO: Z, or a fragment thereof, can be determined conventionally using known computer programs. A preferred method for determining the best overall match between a query sequence (a sequence of the present invention) and a subject sequence, also referred to as a global sequence alignment, can be determined using the FASTDB computer program based on the algorithm of Brutlag et al. (Comp. App. Biosci.6:237-245 (1990)). In a sequence alignment the query and subject sequences are either both nucleotide sequences or both amino acid sequences. The result of said global sequence alignment is expressed as percent identity. Preferred parameters used in a FASTDB amino acid alignment are: Matrix=PAM 0, k-tuple=2, Mismatch Penalty=1, Joining Penalty=20, Randomization Group Length=0, Cutoff Score=1, Window Size=sequence length, Gap Penalty=5, Gap Size Penalty=0.05, Window Size=500 or the length of the subject amino acid sequence, whichever is shorter.

[0124] If the subject sequence is shorter than the query sequence due to N- or C-terminal deletions, not because of internal deletions, a manual correction must be made o the results. This is because the FASTDB program does not account for N- and C-terminal truncations of the subject sequence when calculating global percent identity. For subject sequences truncated at the N- and C-termini, relative to the query sequence, the percent identity is corrected by calculating the number of residues of the query sequence that are N- and C-terminal of the subject sequence, which are not matched/aligned with a corresponding subject residue, as a percent of the total bases of the query sequence. Whether a residue is matched/aligned is determined by results of the FASTDB sequence alignment. This percentage is then subtracted from the percent identity, calculated by the above FASTDB program using the specified parameters, to arrive at a final percent identity score. This final percent identity score is what is used for the purposes of the present invention. Only residues to the N- and C-termini of the subject sequence, which are not matched/aligned with the query sequence, are considered for the purposes of manually adjusting the percent identity score. That is, only query residue positions outside the farthest N- and C-terminal residues of the subject sequence.

[0125] For example, a 90 amino acid residue subject sequence is aligned with a 100 residue query sequence to determine percent identity. The deletion occurs at the N-terminus of the subject sequence and therefore, the FASTDB alignment does not show a matching/alignment of the first 10 residues at the N-terminus. The 10 unpaired residues represent 10% of the sequence (number of residues at the N- and C-termini not matched/total number of residues in the query sequence) so 10% is subtracted from the percent identity score calculated by the FASTDB program. If the remaining 90 residues were perfectly matched the final percent identity would be 90%. In another example, a 90 residue subject sequence is compared with a 100 residue query sequence. This time the deletions are internal deletions so there are no residues at the N- or C-termini of the subject sequence which are not matched/aligned with the query. In this case the percent identity calculated by FASTDB is not manually corrected. Once again, only residue positions outside the N- and C-terminal ends of the subject sequence, as displayed in the FASTDB alignment, which are not matched/aligned with the query sequence are manually corrected for. No other manual corrections are to made for the purposes of the present invention.

[0126] The polynucleotide variants of the invention may contain alterations in the coding regions, non-coding regions, or both. Especially preferred are polynucleotide variants containing alterations, which produce silent substitutions, additions, or deletions, but do not alter the properties or activities of the encoded polypeptide. Nucleotide variants produced by silent substitutions due to the degeneracy of the genetic code are preferred. Moreover, polypeptide variants in which less than 50, less than 40, less than 30, less than 20, less than 10, or 5-50, 5-25, 5-10, 1-5, or 1-2 amino acids are substituted, deleted, or added in any combination are also preferred. Polynucleotide variants can be produced for a variety of reasons, e.g., to optimize codon expression for a particular host (change codons in the human mRNA to those preferred by a bacterial host such as E. coli).

[0127] Naturally occurring variants are called “allelic variants,” and refer to one of several alternate forms of a gene occupying a given locus on a chromosome of an organism. (Genes II, Lewin, B., ed., John Wiley & Sons, New York (1985).) These allelic variants can vary at either the polynucleotide and/or polypeptide level and are included in the present invention. Alternatively, non-naturally occurring variants may be produced by mutagenesis techniques or by direct synthesis.

[0128] Using known methods of protein engineering and recombinant DNA technology, variants may be generated to improve or alter the characteristics of the polypeptides of the present invention. For instance, one or more amino acids can be deleted from the N-terminus or C-terminus of the polypeptides of the present invention without substantial loss of biological function. As an example, the authors of Ron et al., J. Biol. Chem. 268:2984-2988 (1993), reported variant KGF proteins having heparin binding activity even after deleting 3, 8, or 27 amino-terminal amino acid residues. Similarly, Interferon gamma exhibited up to ten times higher activity after deleting 8-10 amino acid residues from the carboxy terminus of this protein. (Dobeli et al., J. Biotechnology 7:199-216 (1988).)

[0129] Moreover, ample evidence demonstrates that variants often retain a biological activity similar to that of the naturally occurring protein. For example, Gayle and coworkers (J. Biol. Chem. 268:22105-22111 (1993)) conducted extensive mutational analysis of human cytokine IL-1a. They used random mutagenesis to generate over 3,500 individual IL-1a mutants that averaged 2.5 amino acid changes per variant over the entire length of the molecule. Multiple mutations were examined at every possible amino acid position. The investigators found that “[m]ost of the molecule could be altered with little effect on either [binding or biological activity].” In fact, only 23 unique amino acid sequences, out of more than 3,500 nucleotide sequences examined, produced a protein that significantly differed in activity from wild-type.

[0130] Furthermore, even if deleting one or more amino acids from the N-terminus or C-terminus of a polypeptide results in modification or loss of one or more biological functions, other biological activities may still be retained. For example, the ability of a deletion variant to induce and/or to bind antibodies, which recognize the secreted form will likely be retained when less than the majority of the residues of the secreted form are removed from the N-terminus or C-terminus. Whether a particular polypeptide lacking N- or C-terminal residues of a protein retains such immunogenic activities can readily be determined by routine methods described herein and otherwise known in the art.

[0131] Thus, the invention further includes polypeptide variants which show a functional activity (e.g., biological activity) of the polypeptides of the invention. Such variants include deletions, insertions, inversions, repeats, and substitutions selected according to general rules known in the art so as have little effect on activity.

[0132] The present application is directed to nucleic acid molecules at least 80%, 85%, 90%, 95%, 96%, 97%, 98%, 99% or 100% identical to the nucleic acid sequences disclosed herein, (e.g., encoding a polypeptide having the amino acid sequence of an N and/or C terminal deletion), irrespective of whether they encode a polypeptide having functional activity. This is because even where a particular nucleic acid molecule does not encode a polypeptide having functional activity, one of skill in the art would still know how to use the nucleic acid molecule, for instance, as a hybridization probe or a polymerase chain reaction (PCR) primer. Uses of the nucleic acid molecules of the present invention that do not encode a polypeptide having functional activity include, inter alia, (1) isolating a gene or allelic or splice variants thereof in a cDNA library; (2) in situ hybridization (e.g., “FISH”) to metaphase chromosomal spreads to provide precise chromosomal location of the gene, as described in Verma et al., Human Chromosomes: A Manual of Basic Techniques, Pergamon Press, New York (1988); (3) Northern Blot analysis for detecting mRNA expression in specific tissues (e.g., normal excretory system or diseased excretory system tissues); and (4) in situ hybridization (e.g., histochemistry) for detecting mRNA expression in specific tissues (e.g., normal excretory system or diseased excretory system tissues).

[0133] Preferred, however, are nucleic acid molecules having sequences at least 80%, 85%, 90%, 95%, 96%, 97%, 98%, 99% or 100% identical to the nucleic acid sequences disclosed herein, which do, in fact, encode a polypeptide having functional activity. By a polypeptide having “functional activity” is meant, a polypeptide capable of displaying one or more known functional activities associated with a full-length (complete) protein of the invention. Such functional activities include, but are not limited to, biological activity, antigenicity [ability to bind (or compete with a polypeptide of the invention for binding) to an anti-polypeptide of the invention antibody], immunogenicity (ability to generate antibody which binds to a specific polypeptide of the invention), ability to form multimers with polypeptides of the invention, and ability to bind to a receptor or ligand for a polypeptide of the invention.

[0134] The functional activity of the polypeptides, and fragments, variants and derivatives of the invention, can be assayed by various methods.

[0135] For example, in one embodiment where one is assaying for the ability to bind or compete with full-length polypeptide of the present invention for binding to an anti-polypeptide of the invention antibody, various immunoassays known in the art can be used, including but not limited to, competitive and non-competitive assay systems using techniques such as radioimmunoassays, ELISA (enzyme linked immunosorbent assay), “sandwich” immunoassays, immunoradiometric assays, gel diffusion precipitation reactions, immunodiffusion assays, in situ immunoassays (using colloidal gold, enzyme or radioisotope labels, for example), western blots, precipitation reactions, agglutination assays (e.g., gel agglutination assays, hemagglutination assays), complement fixation assays, immunofluorescence assays, protein A assays, and immunoelectrophoresis assays, etc. In one embodiment, antibody binding is detected by detecting a label on the primary antibody. In another embodiment, the primary antibody is detected by detecting binding of a secondary antibody or reagent to the primary antibody. In a further embodiment, the secondary antibody is labeled. Many means are known in the art for detecting binding in an immunoassay and are within the scope of the present invention.

[0136] In another embodiment, where a ligand is identified, or the ability of a polypeptide fragment, variant or derivative of the invention to multimerize is being evaluated, binding can be assayed, e.g., by means well-known in the art, such as, for example, reducing and non-reducing gel chromatography, protein affinity chromatography, and affinity blotting. See generally, Phizicky et al., Microbiol. Rev. 59:94-123 (1995). In another embodiment, the ability of physiological correlates of a polypeptide of the present invention to bind to a substrate(s) of the polypeptide of the invention can be routinely assayed using techniques known in the art.

[0137] In addition, assays described herein (see Examples) and otherwise known in the art may routinely be applied to measure the ability of polypeptides of the present invention and fragments, variants and derivatives thereof to elicit polypeptide related biological activity (either in vitro or in vivo). Other methods will be known to the skilled artisan and are within the scope of the invention.

[0138] Of course, due to the degeneracy of the genetic code, one of ordinary skill in the art will immediately recognize that a large number of the nucleic acid molecules having a sequence at least 80%, 85%, 90%, 95%, 96%, 97%, 98%, 99%, or 100% identical to, for example, the nucleic acid sequence of the cDNA contained in Clone ID NO: Z, a nucleic acid sequence referred to in Table 1A (e.g., SEQ ID NO: X), a nucleic acid sequence disclosed in Table 2 (e.g., the nucleic acid sequence delineated in columns 8 and 9) or fragments thereof, will encode polypeptides “having functional activity.” In fact, since degenerate variants of any of these nucleotide sequences all encode the same polypeptide, in many instances, this will be clear to the skilled artisan even without performing the above described comparison assay. It will be further recognized in the art that, for such nucleic acid molecules that are not degenerate variants, a reasonable number will also encode a polypeptide having functional activity. This is because the skilled artisan is fully aware of amino acid substitutions that are either less likely or not likely to significantly effect protein function (e.g., replacing one aliphatic amino acid with a second aliphatic amino acid), as further described below.

[0139] For example, guidance concerning how to make phenotypically silent amino acid substitutions is provided in Bowie et al., “Deciphering the Message in Protein Sequences: Tolerance to Amino Acid Substitutions,” Science 247:1306-1310 (1990), wherein the authors indicate that there are two main strategies for studying the tolerance of an amino acid sequence to change.

[0140] The first strategy exploits the tolerance of amino acid substitutions by natural selection during the process of evolution. By comparing amino acid sequences in different species, conserved amino acids can be identified. These conserved amino acids are likely important for protein function. In contrast, the amino acid positions where substitutions have been tolerated by natural selection indicates that these positions are not critical for protein function. Thus, positions tolerating amino acid substitution could be modified while still maintaining biological activity of the protein.

[0141] The second strategy uses genetic engineering to introduce amino acid changes at specific positions of a cloned gene to identify regions critical for protein function. For example, site directed mutagenesis or alanine-scanning mutagenesis (introduction of single alanine mutations at every residue in the molecule) can be used. See Cunningham et al., Science 244:1081-1085 (1989). The resulting mutant molecules can then be tested for biological activity.

[0142] As the authors state, these two strategies have revealed that proteins are surprisingly tolerant of amino acid substitutions. The authors further indicate which amino acid changes are likely to be permissive at certain amino acid positions in the protein. For example, most buried (within the tertiary structure of the protein) amino acid residues require nonpolar side chains, whereas few features of surface side chains are generally conserved. Moreover, tolerated conservative amino acid substitutions involve replacement of the aliphatic or hydrophobic amino acids Ala, Val, Leu and Ile; replacement of the hydroxyl residues Ser and Thr; replacement of the acidic residues Asp and Glu; replacement of the amide residues Asn and Gln, replacement of the basic residues Lys, Arg, and His; replacement of the aromatic residues Phe, Tyr, and Trp, and replacement of the small-sized amino acids Ala, Ser, Thr, Met, and Gly. Besides conservative amino acid substitutions, variants of the present invention include (i) substitutions with one or more of the non-conserved amino acid residues, where the substituted amino acid residues may or may not be one encoded by the genetic code, or (ii) substitutions with one or more of the amino acid residues having a substituent group, or (iii) fusion of the mature polypeptide with another compound, such as a compound to increase the stability and/or solubility of the polypeptide (for example, polyethylene glycol), or (iv) fusion of the polypeptide with additional amino acids, such as, for example, an IgG Fc fusion region peptide, serum albumin (preferably human serum albumin) or a fragment or variant thereof, or leader or secretory sequence, or a sequence facilitating purification. Such variant polypeptides are deemed to be within the scope of those skilled in the art from the teachings herein.

[0143] For example, polypeptide variants containing amino acid substitutions of charged amino acids with other charged or neutral amino acids may produce proteins with improved characteristics, such as less aggregation. Aggregation of pharmaceutical formulations both reduces activity and increases clearance due to the aggregate's immunogenic activity. See Pinckard et al., Clin. Exp. Immunol. 2:331-340 (1967); Robbins et al., Diabetes 36:838-845 (1987); Cleland et al., Crit. Rev. Therapeutic Drug Carrier Systems 10:307-377 (1993).

[0144] A further embodiment of the invention relates to polypeptides which comprise the amino acid sequence of a polypeptide having an amino acid sequence which contains at least one amino acid substitution, but not more than 50 amino acid substitutions, even more preferably, not more than 40 amino acid substitutions, still more preferably, not more than 30 amino acid substitutions, and still even more preferably, not more than 20 amino acid substitutions from a polypeptide sequence disclosed herein. Of course it is highly preferable for a polypeptide to have an amino acid sequence which comprises the amino acid sequence of a polypeptide of SEQ ID NO: Y, an amino acid sequence encoded by SEQ ID NO: X, an amino acid sequence encoded by the portion of SEQ ID NO: X as defined in columns 8 and 9 of Table 2, an amino acid sequence encoded by the complement of SEQ ID NO: X, and/or the amino acid sequence encoded by cDNA contained in Clone ID NO: Z which contains, in order of ever-increasing preference, at least one, but not more than 10, 9, 8, 7, 6, 5, 4, 3, 2 or 1 amino acid substitutions.

[0145] In specific embodiments, the polypeptides of the invention comprise, or alternatively, consist of, fragments or variants of a reference amino acid sequence selected from: (a) the amino acid sequence of SEQ ID NO: Y or fragments thereof (e.g., the mature form and/or other fragments described herein); (b) the amino acid sequence encoded by SEQ ID NO: X or fragments thereof, (c) the amino acid sequence encoded by the complement of SEQ ID NO: X or fragments thereof, (d) the amino acid sequence encoded by the portion of SEQ ID NO: X as defined in columns 8 and 9 of Table 2 or fragments thereof, and (e) the amino acid sequence encoded by cDNA contained in Clone ID NO: Z or fragments thereof, wherein the fragments or variants have 1-5, 5-10, 5-25, 5-50, 10-50 or 50-150, amino acid residue additions, substitutions, and/or deletions when compared to the reference amino acid sequence. In preferred embodiments, the amino acid substitutions are conservative. Polynucleotides encoding these polypeptides are also encompassed by the invention.

[0146] Polynucleotide and Polypeptide Fragments

[0147] The present invention is also directed to polynucleotide fragments of the polynucleotides (nucleic acids) of the invention. In the present invention, a “polynucleotide fragment” refers to a polynucleotide having a nucleic acid sequence which, for example: is a portion of the cDNA contained in Clone ID NO: Z or the complementary strand thereto; is a portion of the polynucleotide sequence encoding the polypeptide encoded by the cDNA contained in Clone ID NO: Z or the complementary strand thereto; is a portion of a polynucleotide sequence encoding the amino acid sequence encoded by the region of SEQ ID NO: X as defined in columns 8 and 9 of Table 2 or the complementary strand thereto; is a portion of the polynucleotide sequence of SEQ ID NO: X as defined in columns 8 and 9 of Table 2 or the complementary strand thereto; is a portion of the polynucleotide sequence in SEQ ID NO: X or the complementary strand thereto; is a polynucleotide sequence encoding a portion of the polypeptide of SEQ ID NO: Y; is a polynucleotide sequence encoding a portion of a polypeptide encoded by SEQ ID NO: X; is a polynucleotide sequence encoding a portion of a polypeptide encoded by the complement of the polynucleotide sequence in SEQ ID NO: X; is a portion of a polynucleotide sequence encoding the amino acid sequence encoded by the region of SEQ ID NO: B as defined in column 6 of Table 1B or the complementary strand thereto; or is a portion of the polynucleotide sequence of SEQ ID NO: B as defined in column 6 of Table 1B or the complementary strand thereto.

[0148] The polynucleotide fragments of the invention are preferably at least about 15 nt, and more preferably at least about 20 nt, still more preferably at least about 30 nt, and even more preferably, at least about 40 nt, at least about 50 nt, at least about 75 nt, or at least about 150 nt in length. A fragment “at least 20 nt in length,” for example, is intended to include 20 or more contiguous bases from the cDNA sequence contained in Clone ID NO: Z, or the nucleotide sequence shown in SEQ ID NO: X or the complementary stand thereto. In this context “about” includes the particularly recited value or a value larger or smaller by several (5, 4, 3, 2, or 1) nucleotides, at either terminus or at both termini. These nucleotide fragments have uses that include, but are not limited to, as diagnostic probes and primers as discussed herein. Of course, larger fragments (e.g., at least 160, 170, 180, 190, 200, 250, 500, 600, 1000, or 2000 nucleotides in length) are also encompassed by the invention.

[0149] Moreover, representative examples of polynucleotide fragments of the invention, comprise, or alternatively consist of, a sequence from about nucleotide number 1-50, 51-100, 101-150, 151-200, 201-250, 251-300, 301-350, 351-400, 401-450, 451-500, 501-550, 551-600, 651-700, 701-750, 751-800, 800-850, 851-900, 901-950, 951-1000, 1001-1050, 1051-1100, 1101-1150, 1151-1200, 1201-1250, 1251-1300, 1301-1350, 1351-1400, 1401-1450, 1451-1500, 1501-1550, 1551-1600, 1601-1650, 1651-1700, 1701-1750, 1751-1800, 1801-1850, 1851-1900, 1901-1950, 1951-2000, 2001-2050, 2051-2100, 2101-2150, 2151-2200, 2201-2250, 2251-2300, 2301-2350, 2351-2400, 2401-2450, 2451-2500, 2501-2550, 2551-2600, 2601-2650, 2651-2700, 2701-2750, 2751-2800, 2801-2850, 2851-2900, 2901-2950, 2951-3000, 3001-3050, 3051-3100, 3101-3150, 3151-3200, 3201-3250, 3251-3300, 3301-3350, 3351-3400, 3401-3450, 3451-3500, 3501-3550, 3551-3600, 3601-3650, 3651-3700, 3701-3750, 3751-3800, 3801-3850, 3851-3900, 3901-3950, 3951-4000, 4001-4050, 4051-4100, 4101-4150, 4151-4200, 4201-4250, 4251-4300, 4301-4350, 4351-4400, 4401-4450, 4451-4500, 4501-4550, 4551-4600, 4601-4650, 4651-4700, 4701-4750, 4751-4800, 4801-4850, 4851-4900, 4901-4950, 4951-5000, 5001-5050, 5051-5100, 5101-5150, 5151-5200, 5201-5250, 5251-5300, 5301-5350, 5351-5400, 5401-5450, 5451-5500, 5501-5550, 5551-5600, 5601-5650, 5651-5700, 5701-5750, 5751-5800, 5801-5850, 5851-5900, 5901-5950, 5951-6000, 6001-6050, 6051-6100, 6101-6150, 6151-6200, 6201-6250, 6251-6300, 6301-6350, 6351-6400, 6401-6450, 6451-6500, 6501-6550, 6551-6600, 6601-6650, 6651-6700, 6701-6750, 6751-6800, 6801-6850, 6851-6900, 6901-6950, 6951-7000, 7001-7050, 7051-7100, 7101-7150, 7151-7200, 7201-7250, 7251-7300 or 7301 to the end of SEQ ID NO: X, or the complementary strand thereto. In this context “about” includes the particularly recited range or a range larger or smaller by several (5, 4, 3, 2, or 1) nucleotides, at either terminus or at both termini. Preferably, these fragments encode a polypeptide, which has a functional activity (e.g., biological activity). More preferably, these polynucleotides can be used as probes or primers as discussed herein. Polynucleotides which hybridize to one or more of these polynucleotides under stringent hybridization conditions or alternatively, under lower stringency conditions are also encompassed by the invention, as are polypeptides encoded by these polynucleotides.

[0150] Further representative examples of polynucleotide fragments of the invention, comprise, or alternatively consist of, a sequence from about nucleotide number 1-50, 51-100, 101-150, 151-200, 201-250, 251-300, 301-350, 351-400, 401-450, 451-500, 501-550, 551-600, 651-700, 701-750, 751-800, 800-850, 851-900, 901-950, 951-1000, 1001-1050, 1051-1100, 1101-1150, 1151-1200, 1201-1250, 1251-1300, 1301-1350, 1351-1400, 1401-1450, 1451-1500, 1501-1550, 1551-1600, 1601-1650, 1651-1700, 1701-1750, 1751-1800, 1801-1850, 1851-1900, 1901-1950, 1951-2000, 2001-2050, 2051-2100, 2101-2150, 2151-2200, 2201-2250, 2251-2300, 2301-2350, 2351-2400, 2401-2450, 2451-2500, 2501-2550, 2551-2600, 2601-2650, 2651-2700, 2701-2750, 2751-2800, 2801-2850, 2851-2900, 2901-2950, 2951-3000, 3001-3050, 3051-3100, 3101-3150, 3151-3200, 3201-3250, 3251-3300, 3301-3350, 3351-3400, 3401-3450, 3451-3500, 3501-3550, 3551-3600, 3601-3650, 3651-3700, 3701-3750, 3751-3800, 3801-3850, 3851-3900, 3901-3950, 3951-4000, 4001-4050, 4051-4100, 4101-4150, 4151-4200, 4201-4250, 4251-4300, 4301-4350, 4351-4400, 4401-4450, 4451-4500, 4501-4550, 4551-4600, 4601-4650, 4651-4700, 4701-4750, 4751-4800, 4801-4850, 4851-4900, 4901-4950, 4951-5000, 5001-5050, 5051-5100, 5101-5150, 5151-5200, 5201-5250, 5251-5300, 5301-5350, 5351-5400, 5401-5450, 5451-5500, 5501-5550, 5551-5600, 5601-5650, 5651-5700, 5701-5750, 5751-5800, 5801-5850, 5851-5900, 5901-5950, 5951-6000, 6001-6050, 6051-6100, 6101-6150, 6151-6200, 6201-6250, 6251-6300, 6301-6350, 6351-6400, 6401-6450, 6451-6500, 6501-6550, 6551-6600, 6601-6650, 6651-6700, 6701-6750, 6751-6800, 6801-6850, 6851-6900, 6901-6950, 6951-7000, 7001-7050, 7051-7100, 7101-7150, 7151-7200, 7201-7250, 7251-7300 or 7301 to the end of the cDNA sequence contained in Clone ID NO: Z, or the complementary strand thereto. In this context “about” includes the particularly recited range or a range larger or smaller by several (5, 4, 3, 2, or 1) nucleotides, at either terminus or at both termini. Preferably, these fragments encode a polypeptide which has a functional activity (e.g., biological activity). More preferably, these polynucleotides can be used as probes or primers as discussed herein. Polynucleotides which hybridize to one or more of these polynucleotides under stringent hybridization conditions or alternatively, under tower stringency conditions are also encompassed by the invention, as are polypeptides encoded by these polynucleotides.

[0151] Moreover, representative examples of polynucleotide fragments of the invention comprise, or alternatively consist of, a nucleic acid sequence comprising one, two, three, four, five, six, seven, eight, nine, ten, or more of the above described polynucleotide fragments of the invention in combination with a polynucleotide sequence delineated in Table 1B column 6. Additional, representative examples of polynucleotide fragments of the invention comprise, or alternatively consist of, a nucleic acid sequence comprising one, two, three, four, five, six, seven, eight, nine, ten, or more of the above described polynucleotide fragments of the invention in combination with a polynucleotide sequence that is the complementary strand of a sequence delineated in column 6 of Table 1B. In further embodiments, the above-described polynucleotide fragments of the invention comprise, or alternatively consist of, sequences delineated in Table 1B, column 6, and have a nucleic acid sequence which is different from that of the BAC fragment having the sequence disclosed in SEQ ID NO: B (see Table 1B, column 5). In additional embodiments, the above-described polynucleotide fragments of the invention comprise, or alternatively consist of, sequences delineated in Table 1B, column 6, and have a nucleic acid sequence which is different from that published for the BAC clone identified as BAC ID NO: A (see Table 1B, column 4). In additional embodiments, the above-described polynucleotides of the invention comprise, or alternatively consist of, sequences delineated Table 1B, column 6, and have a nucleic acid sequence which is different from that contained in the BAC clone identified as BAC ID NO: A (see Table 1B, column 4). Polypeptides encoded by these polynucleotides, other polynucleotides that encode these polypeptides, and antibodies that bind these polypeptides are also encompassed by the invention. Additionally, fragments and variants of the above-described polynucleotides and polypeptides are also encompassed by the invention.

[0152] In additional specific embodiments, polynucleotides of the invention comprise, or alternatively consist of, one, two, three, four, five, six, seven, eight, nine, ten, or more fragments of the sequences delineated in column 6 of Table 1B, and the polynucleotide sequence of SEQ ID NO: X (e.g., as defined in Table 1B, column 2) or fragments or variants thereof. Polypeptides encoded by these polynucleotides, other polynucleotides that encode these polypeptides, and antibodies that bind these polypeptides are also encompassed by the invention.

[0153] In additional specific embodiments, polynucleotides of the invention comprise, or alternatively consist of, one, two, three, four, five, six, seven, eight, nine, ten, or more fragments of the sequences delineated in column 6 of Table 1B which correspond to the same Clone ID NO: Z (see Table 1B, column 1), and the polynucleotide sequence of SEQ ID NO: X (e.g., as defined in Table 1A or 1B) or fragments or variants thereof. Polypeptides encoded by these polynucleotides, other polynucleotides that encode these polypeptides, and antibodies that bind these polypeptides are also encompassed by the invention.

[0154] In further specific embodiments, polynucleotides of the invention comprise, or alternatively consist of, one, two, three, four, five, six, seven, eight, nine, ten, or more fragments of the sequences delineated in the same row of column 6 of Table 1B, and the polynucleotide sequence of SEQ ID NO: X (e.g., as defined in Table 1A or 1B) or fragments or variants thereof. Polypeptides encoded by these polynucleotides, other polynucleotides that encode these polypeptides, and antibodies that bind these polypeptides are also encompassed by the invention.

[0155] In additional specific embodiments, polynucleotides of the invention comprise, or alternatively consist of a polynucleotide sequence in which the 3′ 10 polynucleotides of one of the sequences delineated in column 6 of Table 1B and the 5′ 10 polynucleotides of the sequence of SEQ ID NO: X are directly contiguous. Nucleic acids which hybridize to the complement of these 20 contiguous polynucleotides under stringent hybridization conditions or alternatively, under lower stringency conditions, are also encompassed by the invention. Polypeptides encoded by these polynucleotides and/or nucleic acids, other polynucleotides and/or nucleic acids that encode these polypeptides, and antibodies that bind these polypeptides are also encompassed by the invention. Additionally, fragments and variants of the above-described polynucleotides, nucleic acids, and polypeptides are also encompassed by the invention.

[0156] In additional specific embodiments, polynucleotides of the invention comprise, or alternatively consist of a polynucleotide sequence in which the 3′ 10 polynucleotides of one of the sequences delineated in column 6 of Table 1B and the 5′ 10 polynucleotides of a fragment or variant of the sequence of SEQ ID NO: X (e.g., as described herein) are directly contiguous Nucleic acids which hybridize to the complement of these 20 contiguous polynucleotides under stringent hybridization conditions or alternatively, under lower stringency conditions, are also encompassed by the invention. Polypeptides encoded by these polynucleotides and/or nucleic acids, other polynucleotides and/or nucleic acids encoding these polypeptides, and antibodies that bind these polypeptides are also encompassed by the invention. Additionally, fragments and variants of the above-described polynucleotides, nucleic acids, and polypeptides are also encompassed by the invention.

[0157] In further specific embodiments, polynucleotides of the invention comprise, or alternatively consist of a polynucleotide sequence in which the 3′ 10 polynucleotides of a fragment or variant of the sequence of SEQ ID NO: X and the 5′ 10 polynucleotides of the sequence of one of the sequences delineated in column 6 of Table 1 B are directly contiguous. Nucleic acids which hybridize to the complement of these 20 contiguous polynucleotides under stringent hybridization conditions or alternatively, under lower stringency conditions, are also encompassed by the invention. Polypeptides encoded by these polynucleotides and/or nucleic acids, other polynucleotides and/or nucleic acids encoding these polypeptides, and antibodies that bind these polypeptides are also encompassed by the invention. Additionally, fragments and variants of the above-described polynucleotides, nucleic acids, and polypeptides are also encompassed by the invention.

[0158] In specific embodiments, polynucleotides of the invention comprise, or alternatively consist of a polynucleotide sequence in which the 3′ 10 polynucleotides of one of the sequences delineated in column 6 of Table 1B and the 5′ 10 polynucleotides of another sequence in column 6 are directly contiguous. In preferred embodiments, the 3′ 10 polynucleotides of one of the sequences delineated in column 6 of Table 1B is directly contiguous with the 5′ 10 polynucleotides of the next sequential exon delineated in Table 1B, column 6. Nucleic acids which hybridize to the complement of these 20 contiguous polynucleotides under stringent hybridization conditions or alternatively, under lower stringency conditions, are also encompassed by the invention. Polypeptides encoded by these polynucleotides and/or nucleic acids, other polynucleotides and/or nucleic acids encoding these polypeptides, and antibodies that bind these polypeptides are also encompassed by the invention. Additionally, fragments and variants of the above-described polynucleotides, nucleic acids, and polypeptides are also encompassed by the invention.

[0159] In the present invention, a “polypeptide fragment” refers to an amino acid sequence which is a portion of that contained in SEQ ID NO: Y, a portion of an amino acid sequence encoded by the portion of SEQ ID NO: X as defined in columns 8 and 9 of Table 2, a portion of an amino acid sequence encoded by the polynucleotide sequence of SEQ ID NO: X, a portion of an amino acid sequence encoded by the complement of the polynucleotide sequence in SEQ ID NO: X, and/or a portion of an amino acid sequence encoded by the cDNA contained in Clone ID NO: Z. Protein (polypeptide) fragments may be “free-standing,” or comprised within a larger polypeptide of which the fragment forms a part or region, most preferably as a single continuous region. Representative examples of polypeptide fragments of the invention, include, for example, fragments comprising, or alternatively consisting of, from about amino acid number 1-20, 21-40, 41-60, 61-80, 81-100, 102-120, 121-140, 141-160, 161-180, 181-200, 201-220, 221-240, 241-260, 261-280, 281-300, 301-320, 321-340, 341-360, 361-380, 381-400, 401-420, 421-440, 441-460, 461-480, 481-500, 501-520, 521-540, 541-560, 561-580, 581-600, 601-620, 621-640, 641-660, 661-680, 681-700, 701-720, 721-740, 741-760, 761-780, 781-800, 801-820, 821-840, 841-860, 861-880, 881-900, 901-920, 921-940, 941-960, 961-980, 981-1000, 1001-1020, 1021-1040, 1041-1060, 1061-1080, 1081-1100, 1101-1120, 1121-1140, 1141-1160, 1161-1180, 1181-1200, 1201-1220, 1221-1240, 1241-1260, 1261-1280, 1281-1300, 1301-1320, 1321-1340, 1341-1360, 1361-1380, 1381-1400, 1401-1420, 1421-1440, or 1441 to the end of the coding region. In a preferred embodiment, polypeptide fragments of the invention include, for example, fragments comprising, or alternatively consisting of, from about amino acid number 1-20, 21-40, 41-60, 61-80, 81-100, 102-120, 121-140, 141-160, 161-180, 181-200, 201-220, 221-240, 241-260, 261-280, 281-300, 301-320, 321-340, 341-360, 361-380, 381-400, 401-420, 421-440, 441-460, 461-480, 481-500, 501-520, 521-540, 541-560, 561-580, 581-600, 601-620, 621-640, 641-660, 661-680, 681-700, 701-720, 721-740, 741-760, 761-780, 781-800, 801-820, 821-840, 841-860, 861-880, 881-900, 901-920, 921-940, 941-960, 961-980, 981-1000, 1001-1020, 1021-1040, 1041-1060, 1061-1080, 1081-1100, 1101-1120, 1121-1140, 1141-1160, 1161-1180, 1181-1200, 1201-1220, 1221-1240, 1241-1260, 1261-1280, 1281-1300, 1301-1320, 1321-1340, 1341-1360, 1361-1380, 1381-1400, 1401-1420, 1421-1440, or 1441 to the end of the coding region of SEQ ID NO: Y. Moreover, polypeptide fragments of the invention may be at least about 10, 15, 20, 25, 30, 35, 40, 45, 50, 55, 60, 65, 70, 75, 80, 85, 90, 100, 110, 120, 130, 140, or 150 amino acids in length. In this context “about” includes the particularly recited ranges or values, or ranges or values larger or smaller by several (5, 4, 3, 2, or 1) amino acids, at either extreme or at both extremes. Polynucleotides encoding these polypeptide fragments are also encompassed by the invention.

[0160] Even if deletion of one or more amino acids from the N-terminus of a protein results in modification of loss of one or more biological functions of the protein, other functional activities (e.g., biological activities, ability to multimerize, ability to bind a ligand) may still be retained. For example, the ability of shortened muteins to induce and/or bind to antibodies which recognize the complete or mature forms of the polypeptides generally will be retained when less than the majority of the residues of the complete or mature polypeptide are removed from the N-terminus. Whether a particular polypeptide lacking N-terminal residues of a complete polypeptide retains such immunologic activities can readily be determined by routine methods described herein and otherwise known in the art. It is not unlikely that a mutein with a large number of deleted N-terminal amino acid residues may retain some biological or immunogenic activities. In fact, peptides composed of as few as six amino acid residues may often evoke an immune response.

[0161] Accordingly, polypeptide fragments include the secreted protein as well as the mature form. Further preferred polypeptide fragments include the secreted protein or the mature form having a continuous series of deleted residues from the amino or the carboxy terminus, or both. For example, any number of amino acids, ranging from 1-60, can be deleted from the amino terminus of either the secreted polypeptide or the mature form. Similarly, any number of amino acids, ranging from 1-30, can be deleted from the carboxy terminus of the secreted protein or mature form. Furthermore, any combination of the above amino and carboxy terminus deletions are preferred. Similarly, polynucleotides encoding these polypeptide fragments are also preferred.

[0162] The present invention further provides polypeptides having one or more residues deleted from the amino terminus of the amino acid sequence of a polypeptide disclosed herein (e.g., a polypeptide of SEQ ID NO: Y, a polypeptide encoded by the polynucleotide sequence contained in SEQ ID NO: X or the complement thereof, a polypeptide encoded by the portion of SEQ ID NO: X as defined in columns 8 and 9 of Table 2, a polypeptide encoded by the portion of SEQ ID NO: B as defined in column 6 of Table 1B, and/or a polypeptide encoded by the cDNA contained in Clone ID NO: Z). In particular, N-terminal deletions may be described by the general formula m−q, where q is a whole integer representing the total number of amino acid residues in a polypeptide of the invention (e.g., the polypeptide disclosed in SEQ ID NO: Y, or the polypeptide encoded by the portion of SEQ ID NO: X as defined in columns 8 and 9 of Table 2), and m is defined as any integer ranging from 2 to q−6. Polynucleotides encoding these polypeptides are also encompassed by the invention.

[0163] The present invention further provides polypeptides having one or more residues from the carboxy terminus of the amino acid sequence of a polypeptide disclosed herein (e.g., a polypeptide of SEQ ID NO: Y, a polypeptide encoded by the polynucleotide sequence contained in SEQ ID NO: X, a polypeptide encoded by the portion of SEQ ID NO: X as defined in columns 8 and 9 of, Table 2, and/or a polypeptide encoded by the cDNA contained in Clone ID NO: Z). In particular, C-terminal deletions may be described by the general formula 1−n, where n is any whole integer ranging from 6 to q−1, and where n corresponds to the position of amino acid residue in a polypeptide of the invention. Polynucleotides encoding these polypeptides are also encompassed by the invention.

[0164] In addition, any of the above described N- or C-terminal deletions can be combined to produce a N- and C-terminal deleted polypeptide. The invention also provides polypeptides having one or more amino acids deleted from both the amino and the carboxyl termini, which may be described generally as having residues m−n of a polypeptide encoded by SEQ ID NO: X (e.g., including, but not limited to, the preferred polypeptide disclosed as SEQ ID NO: Y and the polypeptide encoded by the portion of SEQ ID NO: X as defined in columns 8 and 9 of Table 2), the cDNA contained in Clone ID NO: Z, and/or the complement thereof, where n and m are integers as described above. Polynucleotides encoding these polypeptides are also encompassed by the invention.

[0165] Also as mentioned above, even if deletion of one or more amino acids from the C-terminus of a protein results in modification of loss of one or more biological functions of the protein, other functional activities (e.g., biological activities, ability to multimerize, ability to bind a ligand) may still be retained. For example the ability of the shortened mutein to induce and/or bind to antibodies which recognize the complete or mature forms of the polypeptide generally will be retained when less than the majority of the residues of the complete or mature polypeptide are removed from the C-terminus. Whether a particular polypeptide lacking C-terminal residues of a complete polypeptide retains such immunologic activities can readily be determined by routine methods described herein and otherwise known in the art. It is not unlikely that a mutein with a large number of deleted C-terminal amino acid residues may retain some biological or immunogenic activities. In fact, peptides composed of as few as six amino acid residues may often evoke an immune response.

[0166] The present application is also directed to proteins containing polypeptides at least 80%, 85%, 90%, 95%, 96%, 97%, 98% or 99% identical to a polypeptide sequence set forth herein. In preferred embodiments, the application is directed to proteins containing polypeptides at least 80%, 85%, 90%, 95%, 96%, 97%, 98% or 99% identical to polypeptides having the amino acid sequence of the specific N- and C-terminal deletions. Polynucleotides encoding these polypeptides are also encompassed by the invention.

[0167] Any polypeptide sequence encoded by, for example, the polynucleotide sequences set forth as SEQ ID NO: X or the complement thereof, (presented, for example, in Tables 1A and 2), the cDNA contained in Clone ID NO: Z, or the polynucleotide sequence as defined in column 6 of Table 1B, may be analyzed to determine certain preferred regions of the polypeptide. For example, the amino acid sequence of a polypeptide encoded by a polynucleotide sequence of SEQ ID NO: X (e.g., the polypeptide of SEQ ID NO: Y and the polypeptide encoded by the portion of SEQ ID NO: X as defined in columns 8 and 9 of Table 2) or the EDNA contained in Clone ID NO: Z may be analyzed using the default parameters of the DNASTAR computer algorithm (DNASTAR, Inc., 1228 S. Park St., Madison, Wis. 53715 USA; http://www.dnastar.com/).

[0168] Polypeptide regions that may be routinely obtained using the DNASTAR computer algorithm include, but are not limited to, Garnier-Robson alpha-regions, beta-regions, turn-regions, and coil-regions; Chou-Fasman alpha-regions, beta-regions, and turn-regions; Kyte-Doolittle hydrophilic regions and hydrophobic regions; Eisenberg alpha- and beta-amphipathic regions; Karplus-Schulz flexible regions; Emini surface-forming regions; and Jameson-Wolf regions of high antigenic index. Among highly preferred polynucleotides of the invention in this regard are those that encode polypeptides comprising regions that combine several structural features, such as several (e.g., 1, 2, 3 or 4) of the features set out above.

[0169] Additionally, Kyte-Doolittle hydrophilic regions and hydrophobic regions, Emini surface-forming regions, and Jameson-Wolf regions of high antigenic index (i.e., containing four or more contiguous amino acids having an antigenic index of greater than or equal to 1.5, as identified using the default parameters of the Jameson-Wolf program) can routinely be used to determine polypeptide regions that exhibit a high degree of potential for antigenicity. Regions of high antigenicity are determined from data by DNASTAR analysis by choosing values which represent regions of the polypeptide which are likely to be exposed on the surface of the polypeptide in an environment in which antigen recognition may occur in the process of initiation of an immune response.

[0170] Preferred polypeptide fragments of the invention are fragments comprising, or alternatively, consisting of, an amino acid sequence that displays a functional activity (e.g. biological activity) of the polypeptide sequence of which the amino acid sequence is a fragment. By a polypeptide displaying a “functional activity” is meant a polypeptide capable of one or more known functional activities associated with a full-length protein, such as, for example, biological activity, antigenicity, immunogenicity, and/or multimerization, as described herein.

[0171] Other preferred polypeptide fragments are biologically active fragments. Biologically active fragments are those exhibiting activity similar, but not necessarily identical, to an activity of the polypeptide of the present invention. The biological activity of the fragments may include an improved desired activity, or a decreased undesirable activity.

[0172] In preferred embodiments, polypeptides of the invention comprise, or alternatively consist of, one, two, three, four, five or more of the antigenic fragments of the polypeptide of SEQ ID NO: Y, or portions thereof. Polynucleotides encoding these polypeptides are also encompassed by the invention.

[0173] The present invention encompasses polypeptides comprising, or alternatively consisting of, an epitope of: the polypeptide sequence shown in SEQ ID NO: Y; a polypeptide sequence encoded by SEQ ID NO: X or the complementary strand thereto; the polypeptide sequence encoded by the portion of SEQ ID NO: X as defined in columns 8 and 9 of Table 2; the polypeptide sequence encoded by the portion of SEQ ID NO: B as defined in column 6 of Table 1B or the complement thereto; the polypeptide sequence encoded by the cDNA contained in Clone ID NO: Z; or the polypeptide sequence encoded by a polynucleotide that hybridizes to the sequence of SEQ ID NO: X, the complement of the sequence of SEQ ID NO: X, the complement of a portion of SEQ ID NO: X as defined in columns 8 and 9 of Table 2, or the cDNA sequence contained in Clone ID NO: Z under stringent hybridization conditions or alternatively, under lower stringency hybridization as defined supra. The present invention further encompasses polynucleotide sequences encoding an epitope of a polypeptide sequence of the invention (such as, for example, the sequence disclosed in SEQ ID NO: X, or a fragment thereof), polynucleotide sequences of the complementary strand of a polynucleotide sequence encoding an epitope of the invention, and polynucleotide sequences which hybridize to the complementary strand under stringent hybridization conditions or alternatively, under lower stringency hybridization conditions defined supra.

[0174] The term “epitopes,” as used herein, refers to portions of a polypeptide having antigenic or immunogenic activity in an animal, preferably a mammal, and most preferably in a human. In a preferred embodiment, the present invention encompasses a polypeptide comprising an epitope, as well as the polynucleotide encoding this polypeptide. An “immunogenic epitope,” as used herein, is defined as a portion of a protein that elicits an antibody response in an animal, as determined by any method known in the art, for example, by the methods for generating antibodies described infra. (See, for example, Geysen et al., Proc. Natl. Acad. Sci. USA 81:3998-4002 (1983)). The term “antigenic epitope,” as used herein, is defined as a portion of a protein to which an antibody can immunospecifically bind its antigen as determined by any method well known in the art, for example, by the immunoassays described herein. Immunospecific binding excludes non-specific binding but does not necessarily exclude cross-reactivity with other antigens. Antigenic epitopes need not necessarily be immunogenic.

[0175] Fragments which function as epitopes may be produced by any conventional means. (See, e.g., Houghten, R. A., Proc. Natl. Acad. Sci. USA 82:5131-5135 (1985) further described in U.S. Pat. No. 4,631,211.)

[0176] In the present invention, antigenic epitopes preferably contain a sequence of at least 4, at least 5, at least 6, at least 7, more preferably at least 8, at least 9, at least 10, at least 11, at least 12, at least 13, at least 14, at least 15, at least 20, at least 25, at least 30, at least 40, at least 50, and, most preferably, between about 15 to about 30 amino acids. Preferred polypeptides comprising immunogenic or antigenic epitopes are at least 10, 15, 20, 25, 30, 35, 40, 45, 50, 55, 60, 65, 70, 75, 80, 85, 90, 95, or 100 amino acid residues in length. Additional non-exclusive preferred antigenic epitopes include the antigenic epitopes disclosed herein, as well as portions thereof. Antigenic epitopes are useful, for example, to raise antibodies, including monoclonal antibodies, that specifically bind the epitope. Preferred antigenic epitopes include the antigenic epitopes disclosed herein, as well as any combination of two, three, four, five or more of these antigenic epitopes. Antigenic epitopes can be used as the target molecules in immunoassays. (See, for instance, Wilson et al., Cell 37:767-778 (1984); Sutcliffe et al., Science 219:660-666 (1983)).

[0177] Non-limiting examples of epitopes of polypeptides that can be used to generate antibodies of the invention include a polypeptide comprising, or alternatively consisting of, at least one, two, three, four, five, six or more of the portion(s) of SEQ ID NO: Y specified in column 6 of Table 1A. These polypeptide fragments have been determined to bear antigenic epitopes of the proteins of the invention by the analysis of the Jameson-Wolf antigenic index, which is included in the DNAStar suite of computer programs. By “comprise” it is intended that a polypeptide contains at least one, two, three, four, five, six or more of the portion(s) of SEQ ID NO: Y shown in column 6 of Table 1A, but it may contain additional flanking residues on either the amino or carboxyl termini of the recited portion. Such additional flanking sequences are preferably sequences naturally found adjacent to the portion; i.e., contiguous sequence shown in SEQ ID NO: Y. The flanking sequence may, however, be sequences from a heterologous polypeptide, such as from another protein described herein or from a heterologous polypeptide not described herein. In particular embodiments, epitope portions of a polypeptide of the invention comprise one, two, three, or more of the portions of SEQ ID NO: Y shown in column 6 of Table 1A. Polynucleotides encoding these polypeptides are also encompassed by the invention.

[0178] Similarly, immunogenic epitopes can be used, for example, to induce antibodies according to methods well known in the art. See, for instance, Sutcliffe et al., supra; Wilson et al., supra; Chow et al., Proc. Natl. Acad. Sci. USA 82:910-914; and Bittle et al., J. Gen. Virol. 66:2347-2354 (1985). Preferred immunogenic epitopes include the immunogenic epitopes disclosed herein, as well as any combination of two, three, four, five or more of these immunogenic epitopes. The polypeptides comprising one or more immunogenic epitopes may be presented for eliciting an antibody response together with a carrier protein, such as an albumin, to an animal system (such as rabbit or mouse), or, if the polypeptide is of sufficient length (at least about 25 amino acids), the polypeptide may be presented without a carrier. However, immunogenic epitopes comprising as few as 8 to 10 amino acids have been shown to be sufficient to raise antibodies capable of binding to, at the very least, linear epitopes in a denatured polypeptide (e.g., in Western blotting).

[0179] Epitope-bearing polypeptides of the present invention may be used to induce antibodies according to methods well known in the art including, but not limited to, in vivo immunization, in vitro immunization, and phage display methods. See, e.g., Sutcliffe et al., supra; Wilson et al., supra, and Bittle et al., J. Gen. Virol., 66:2347-2354 (1985). If in vivo immunization is used, animals may be immunized with free peptide; however, anti-peptide antibody titer may be boosted by coupling the peptide to a macromolecular carrier, such as keyhole limpet hemacyanin (KLH) or tetanus toxoid. For instance, peptides containing cysteine residues may be coupled to a carrier using a linker such as maleimidobenzoyl-N-hydroxysuccinimide ester (MBS), while other peptides may be coupled to carriers using a more general linking agent such as glutaraldehyde. Animals such as rabbits, rats and mice are immunized with either free or carrier-coupled peptides, for instance, by intraperitoneal and/or intradermal injection of emulsions containing about 100 μg of peptide or carrier protein and Freund's adjuvant or any other adjuvant known for stimulating an immune response. Several booster injections may be needed, for instance, at intervals of about two weeks, to provide a useful titer of anti-peptide antibody which can be detected, for example, by ELISA assay using free peptide adsorbed to a solid surface. The titer of anti-peptide antibodies in serum from an immunized animal may be increased by selection of anti-peptide antibodies, for instance, by adsorption to the peptide on a solid support and elution of the selected antibodies according to methods well known in the art.

[0180] As one of skill in the art will appreciate, and as discussed above, the polypeptides of the present invention (e.g., those comprising an immunogenic or antigenic epitope) can be fused to heterologous polypeptide sequences. For example, polypeptides of the present invention (including fragments or variants thereof), may be fused with the constant domain of immunoglobulins (IgA, IgE, IgG, IgM), or portions thereof (CH1, CH2, CH3, or any combination thereof and portions thereof, resulting in chimeric polypeptides. By way of another non-limiting example, polypeptides and/or antibodies of the present invention (including fragments or variants thereof) may be fused with albumin (including but not limited to recombinant human serum albumin or fragments or variants thereof (see, e.g., U.S. Pat. No. 5,876,969, issued Mar. 2, 1999, EP Patent 0 413 622, and U.S. Pat. No. 5,766,883, issued Jun. 16, 1998, herein incorporated by reference in their entirety)). In a preferred embodiment, polypeptides and/or antibodies of the present invention (including fragments or variants thereof) are fused with the mature form of human serum albumin (i.e., amino acids 1-585 of human serum albumin as shown in FIGS. 1 and 2 of EP Patent 0 322 094) which is herein incorporated by reference in its entirety. In another preferred embodiment, polypeptides and/or antibodies of the present invention (including fragments or variants thereof) are fused with polypeptide fragments comprising, or alternatively consisting of, amino acid residues 1 -z of human serum albumin, where z is an integer from 369 to 419, as described in U.S. Pat. 5,766,883 herein incorporated by reference in its entirety. Polypeptides and/or antibodies of the present invention (including fragments or variants thereof) may be fused to either the N- or C-terminal end of the heterologous protein (e.g., immunoglobulin Fc polypeptide or human serum albumin polypeptide). Polynucleotides encoding fusion proteins of the invention are also encompassed by the invention.

[0181] Such fusion proteins as those described above may facilitate purification and may increase half-life in vivo. This has been shown for chimeric proteins consisting of the first two domains of the human CD4-polypeptide and various domains of the constant regions of the heavy or light chains of mammalian immunoglobulins. See, e.g., EP 394,827; Traunecker et al., Nature, 331:84-86 (1988). Enhanced delivery of an antigen across the epithelial barrier to the immune system has been demonstrated for antigens (e.g., insulin) conjugated to an FcRn binding partner such as IgG or Fc fragments (see, e.g., PCT Publications WO 96/22024 and WO 99/04813). IgG Fusion proteins that have a disulfide-linked dimeric structure due to the IgG portion desulfide bonds have also been found to be more efficient in binding and neutralizing other molecules than monomeric polypeptides or fragments thereof alone. See, e.g., Fountoulakis et al., J. Biochem., 270:3958-3964 (1995). Nucleic acids encoding the above epitopes can also be recombined with a gene of interest as an epitope tag (e.g., the hemagglutinin (HA) tag or flag tag) to aid in detection and purification of the expressed polypeptide. For example, a system described by Janknecht et al. allows for the ready purification of non-denatured fusion proteins expressed in human cell lines (Janknecht et al., 1991, Proc. Natl. Acad. Sci. USA 88:8972-897). In this system, the gene of interest is subcloned into a vaccinia recombination plasmid such that the open reading frame of the gene is translationally fused to an amino-terminal tag consisting of six histidine residues. The tag serves as a matrix binding domain for the fusion protein. Extracts from cells infected with the recombinant vaccinia virus are loaded onto Ni2+ nitriloacetic acid-agarose column and histidine-tagged proteins can be selectively eluted with imidazole-containing buffers.

[0182] Fission Proteins

[0183] Any polypeptide of the present invention can be used to generate fusion proteins. For example, the polypeptide of the present invention, when fused to a second protein, can be used as an antigenic tag. Antibodies raised against the polypeptide of the present invention can be used to indirectly detect the second protein by binding to the polypeptide. Moreover, because secreted proteins target cellular locations based on trafficking signals, polypeptides of the present invention which are shown to be secreted can be used as targeting molecules once fused to other proteins.

[0184] Examples of domains that can be fused to polypeptides of the present invention include not only heterologous signal sequences, but also other heterologous functional regions. The fusion does not necessarily need to be direct, but may occur through linker sequences.

[0185] In certain preferred embodiments, proteins of the invention are fusion proteins comprising an amino acid sequence that is an N and/or C-terminal deletion of a polypeptide of the invention. In preferred embodiments, the invention is directed to a fusion protein comprising an amino acid sequence that is at least 80%, 85%, 90%, 95%, 96%, 97%, 98% or 99% identical to a polypeptide sequence of the invention. Polynucleotides encoding these proteins are also encompassed by the invention.

[0186] Moreover, fusion proteins may also be engineered to improve characteristics of the polypeptide of the present invention. For instance, a region of additional amino acids, particularly charged amino acids, may be added to the N-terminus of the polypeptide to improve stability and persistence during purification from the host cell or subsequent handling and storage. Also, peptide moieties may be added to the polypeptide to facilitate purification. Such regions may be removed prior to final preparation of the polypeptide. The addition of peptide moieties to facilitate handling of polypeptides are familiar and routine techniques in the art.

[0187] As one of skill in the art will appreciate that, as discussed above, polypeptides of the present invention, and epitope-bearing fragments thereof, can be combined with heterologous polypeptide sequences. For example, the polypeptides of the present invention may be fused with heterologous polypeptide sequences, for example, the polypeptides of the present invention may be fused with the constant domain of immunoglobulins (IgA, IgE, IgG, IgM) or portions thereof (CH1, CH2, CH3, and any combination thereof, including both entire domains and portions thereof), or albumin (including, but not limited to, native or recombinant human albumin or fragments or variants thereof (see, e.g., U.S. Pat. No. 5,876,969, issued Mar. 2, 1999, EP Patent 0 413 622, and U.S. Pat. No. 5,766,883, issued Jun. 16, 1998, herein incorporated by reference in their entirety)), resulting in chimeric polypeptides. For example, EP-A-O 464 533 (Canadian counterpart 2045869) discloses fusion proteins comprising various portions of constant region of immunoglobutin molecules together with another human protein or part thereof. In many cases, the Fc part in a fusion protein is beneficial in therapy and diagnosis, and thus can result in, for example, improved pharmacokinetic properties (EP-A 0232 262). Alternatively, deleting the Fc part after the fusion protein has been expressed, detected, and purified, would be desired. For example, the Fc portion may hinder therapy and diagnosis if the fusion protein is used as an antigen for immunizations. In drug discovery, for example, human proteins, such as hIL-5, have been fused with Fc portions for the purpose of high-throughput screening assays to identify antagonists of hIL-5. See, D. Bennett et al., J. Molecular Recognition 8:52-58 (1995); K. Johanson et al., J. Biol. Chem. 270:9459-9471 (1995).

[0188] Moreover, the polypeptides of the present invention can be fused to marker sequences, such as a polypeptide, which facilitates purification of the fused polypeptide. In preferred embodiments, the marker amino acid sequence is a hexa-histidine peptide, such as the tag provided in a pQE vector (QIAGEN, Inc., 9259 Eton Avenue, Chatsworth, Calif., 91311), among others, many of which are commercially available. As described in Gentz et al., Proc. Natl. Acad. Sci. USA 86:821-824 (1989), for instance, hexa-histidine provides for convenient purification of the fusion protein. Another peptide tag useful for purification, the “HA” tag, corresponds to an epitope derived from the influenza hemagglutinin protein (Wilson et al., Cell 37:767 (1984).)

[0189] Additional fusion proteins of the invention may be generated through the techniques of gene-shuffling, motif-shuffling, exon-shuffling, and/or codon-shuffling (collectively referred to as “DNA shuffling”), briefly described below, and further described herein. DNA shuffling may be employed to modulate the activities of polypeptides of the invention, such methods can be used to generate polypeptides with altered activity, as well as agonists and antagonists of the polypeptides. See, generally, U.S. Pat. Nos. 5,605,793; 5,811,238; 5,830,721; 5,834,252; and 5,837,458, and Patten et al., Curr. Opinion Biotechnol. 8:724-33 (1997); Harayama, Trends Biotechnol. 16(2):76-82 (1998); Hansson et al., J. Mol. Biol. 287:265-76 (1999); and Lorenzo and Blasco, Biotechniques 24(2):308-13 (1998); each of these patents and publications are hereby incorporated by reference in its entirety). In a preferred embodiment, one or more components, motifs, sections, parts, domains, fragments, etc., of a polynucleotide encoding a polypeptide of the invention may be recombined with one or more components, motifs, sections, parts, domains, fragments, etc., of one or more heterologous molecules encoding a heterologous polypeptide.

[0190] Thus, any of these above fusions can be engineered using the polynucleotides or the polypeptides of the present invention.

[0191] Recombinant and Synthetic Production of Polypeptides of the Invention

[0192] The present invention also relates to vectors containing the polynucleotide of the present invention, host cells, and the production of polypeptides by synthetic and recombinant techniques. The vector may be, for example, a phage, plasmid, viral, or retroviral vector. Retroviral vectors may be replication competent or replication defective. In the latter case, viral propagation generally will occur only in complementing host cells.

[0193] The polynucleotides of the invention may be joined to a vector containing a selectable marker for propagation in a host. Generally, a plasmid vector is introduced in a precipitate, such as a calcium phosphate precipitate, or in a complex with a charged lipid. If the vector is a virus, it may be packaged in vitro using an appropriate packaging cell line and then transduced into host cells.

[0194] The polynucleotide insert should be operatively linked to an appropriate promoter, such as the phage lambda PL promoter, the E. coli lac, trp, phoA and tac promoters, the SV40 early and late promoters and promoters of retroviral LTRs, to name a few. Other suitable promoters will be known to the skilled artisan. The expression constructs will further contain sites for transcription initiation, termination, and, in the transcribed region, a ribosome binding site for translation. The coding portion of the transcripts expressed by the constructs will preferably include a translation initiating codon at the beginning and a termination codon (UAA, UGA or UAG) appropriately positioned at the end of the polypeptide to be translated.

[0195] As indicated, the expression vectors will preferably include at least one selectable marker. Such markers include dihydrofolate reductase, G418 or neomycin resistance, glutamine synthase, for eukaryotic cell culture and tetracycline, kanamycin or ampicillin resistance genes for culturing in E. coli and other bacteria. Representative examples of appropriate hosts include, but are not limited to, bacterial cells, such as E. coli, Streptomyces and Salmonella typhimurinim cells; fungal cells, such as yeast cells (e.g., Saccharomyces cerevisiae or Pichia pastoris (ATCC Accession No. 201178)); insect cells such as Drosophila S2 and Spodoptera Sf9 cells; animal cells such as CHO, COS, 293, NSO and Bowes melanoma cells; and plant cells. Appropriate culture mediums and conditions for the above-described host cells are known in the art.

[0196] Among vectors preferred for use in bacteria include pQE70, pQE60 and pQE-9, available from QIAGEN, Inc.; pBluescript vectors, Phagescript vectors, pNH8A, pNE16a, pNH18A, pNH46A, available from Stratagene Cloning Systems, Inc.; and ptrc99a, pKK223-3, pKK233-3, pDR540, pRIT5 available from Pharmacia Biotech, Inc. Among preferred eukaryotic vectors are pWLNEO, pSV2CAT, pOG44, pXT1 and pSG available from Stratagene; and pSVK3, pBPV, pMSG and pSVL available from Pharmacia. Preferred expression vectors for use in yeast systems include, but are not limited to pYES2, pYD1, pTEF1/Zeo, pYES2/GS, pPICZ, pGAPZ, pGAPZalph, pPIC9, pPIC3.5, pHIL-D2, pHIL-S1, pPIC3.5K, pPIC9K, and PAO815 (all available from Invitrogen, Carlsbad, Calif.). Other suitable vectors will be readily apparent to the skilled artisan.

[0197] Vectors which use glutamine synthase (GS) or DHFR as the selectable markers can be amplified in the presence of the drugs methionine sulphoximine or methotrexate, respectively. An advantage of glutamine synthase based vectors are the availabilty of cell lines (e.g., the murine myeloma cell line, NS0) which are glutamine synthase negative. Glutamine synthase expression systems can also function in glutamine synthase expressing cells (e.g., Chinese Hamster Ovary (CHO) cells) by providing additional inhibitor to prevent the functioning of the endogenous gene. A glutamine synthase expression system and components thereof are detailed in PCT publications: WO87/04462; WO86/05807; WO89/01036; WO89/10404; and WO91/06657, which are hereby incorporated in their entireties by reference herein. Additionally, glutamine synthase expression vectors can be obtained from Lonza Biologics, Inc. (Portsmouth, N.H.). Expression and production of monoclonal antibodies using a GS expression system in murine myeloma cells is described in Bebbington et al., Bio/technology 10:169(1992) and in Biblia and Robinson Biotechnol. Prog. 11:1 (1995) which are herein incorporated by reference.

[0198] The present invention also relates to host cells containing the above-described vector constructs described herein, and additionally encompasses host cells containing nucleotide sequences of the invention that are operably associated with one or more heterologous control regions (e.g., promoter and/or enhancer) using techniques known of in the art. The host cell can be a higher eukaryotic cell, such as a mammalian cell (e.g., a human derived cell), or a lower eukaryotic cell, such as a yeast cell, or the host cell can be a prokaryotic cell, such as a bacterial cell. A host strain may be chosen, which modulates the expression of the inserted gene sequences, or modifies and processes the gene product in the specific fashion desired. Expression from certain promoters can be elevated in the presence of certain inducers; thus expression of the genetically engineered polypeptide may be controlled. Furthermore, different host cells have characteristics and specific mechanisms for the translational and post-translational processing and modification (e.g., phosphorylation, cleavage) of proteins. Appropriate cell lines can be chosen to ensure the desired modifications and processing of the foreign protein expressed.

[0199] Introduction of the nucleic acids and nucleic acid constructs of the invention into the host cell can be effected by calcium phosphate transfection, DEAE-dextran mediated transfection, cationic lipid-mediated transfection, electroporation, transduction, infection, or other methods. Such methods are described in many standard laboratory manuals, such as Davis et al., Basic Methods In Molecular Biology (1986). It is specifically contemplated that the polypeptides of the present invention may in fact be expressed by a host cell lacking a recombinant vector.

[0200] In addition to encompassing host cells containing the vector constructs discussed herein, the invention also encompasses primary, secondary, and immortalized host cells of vertebrate origin, particularly mammalian origin, that have been engineered to delete or replace endogenous genetic material (e.g., excretory system antigen coding sequence), and/or to include genetic material (e.g., heterologous polynucleotide sequences) that is operably associated with excretory system associated polynucleotides of the invention, and which activates, alters, and/or amplifies endogenous excretory system associated polynucleotides. For example, techniques known in the art may be used to operably associate heterologous control regions (e.g., promoter and/or enhancer) and endogenous excretory system associated polynucleotide sequences via homologous recombination (see, e.g., U.S. Pat. No. 5,641,670, issued Jun. 24, 1997; International Publication Number WO 96/29411; International Publication Number WO 94/12650; Koller et al., Proc. Natl. Acad. Sci. USA 86:8932-8935 (1989); and Zijlstra et al., Nature 342:435-438 (1989), the disclosures of each of which are incorporated by reference in their entireties).

[0201] Polypeptides of the present invention can also be recovered from: products purified from natural sources, including bodily fluids, tissues and cells, whether directly isolated or cultured; products of chemical synthetic procedures; and products produced by recombinant techniques from a prokaryotic or eukaryotic host, including, for example, bacterial, yeast, higher plant, insect, and mammalian cells. Depending upon the host employed in a recombinant production procedure, the polypeptides of the present invention may be glycosylated or may be non-glycosylated. In addition, polypeptides of the invention may also include an initial modified methionine residue, in some cases as a result of host-mediated processes. Thus, it is well known in the art that the N-terminal methionine encoded by the translation initiation codon generally is removed with high efficiency from any protein after translation in all eukaryotic cells. While the N-terminal methionine on most proteins also is efficiently removed in most prokaryotes, for some proteins, this prokaryotic removal process is inefficient, depending on the nature of the amino acid to which the N-terminal methionine is covalently linked.

[0202] In one embodiment, the yeast Pichia pastoris is used to express polypeptides of the invention in a eukaryotic system. Pichia pastoris is a methylotrophic yeast which can metabolize methanol as its sole carbon source. A main step in the methanol metabolization pathway is the oxidation of methanol to formaldehyde using O₂. This reaction is catalyzed by the enzyme alcohol oxidase. In order to metabolize methanol as its sole carbon source, Pichia pastoris must generate high levels of alcohol oxidase due, in part, to the relatively low affinity of alcohol oxidase for O₂. Consequently, in a growth medium depending on methanol as a main carbon source, the promoter region of one of the two alcohol oxidase genes (AOX1) is highly active. In the presence of methanol, alcohol oxidase produced from the AOX1 gene comprises up to approximately 30% of the total soluble protein in Pichia pastoris. See, Ellis, S. B., et al., Mol. Cell. Biol. 5:1111-21 (1985); Koutz, P. J, et al., Yeast 5:167-77 (1989); Tschopp, J. F., et al., Nucl. Acids Res. 15:3859-76 (1987). Thus, a heterologous coding sequence, such as, for example, a polynucleotide of the present invention, under the transcriptional regulation of all or part of the AOX1 regulatory sequence is expressed at exceptionally high levels in Pichia yeast grown in the presence of methanol.

[0203] In one example, the plasmid vector pPIC9K is used to express DNA encoding a polypeptide of the invention, as set forth herein, in a Pichea yeast system essentially as described in “Pichia Protocols: Methods in Molecular Biology,” D. R. Higgins and J. Cregg, eds. The Humana Press, Totowa, N.J., 1998. This expression vector allows expression and secretion of a polypeptide of the invention by virtue of the strong AOX1 promoter linked to the Pichia pastoris alkaline phosphatase (PHO) secretory signal peptide (i.e., leader) located upstream of a multiple cloning site.

[0204] Many other yeast vectors could be used in place of pPIC9K, such as, pYES2, pYD1, pTEF1/Zeo, pYES2/GS, pPICZ, pGAPZ, pGAPZalpha, pPIC9, pPIC3.5, pHIL-D2, pHIL-S1, pPIC3.5K, and PAO815, as one skilled in the art would readily appreciate, as long as the proposed expression construct provides appropriately located signals for transcription, translation, secretion (if desired), and the like, including an in-frame AUG as required.

[0205] In another embodiment, high-level expression of a heterologous coding sequence, such as, for example, a polynucleotide of the present invention, may be achieved by cloning the heterologous polynucleotide of the invention into an expression vector such as, for example, pGAPZ or pGAPZalpha, and growing the yeast culture in the absence of methanol.

[0206] In addition to encompassing host cells containing the vector constructs discussed herein, the invention also encompasses primary, secondary, and immortalized host cells of vertebrate origin, particularly mammalian origin, that have been engineered to delete or replace endogenous genetic material (e.g., coding sequence), and/or to include genetic material (e.g., heterologous polynucleotide sequences) that is operably associated with polynucleotides of the invention, and which activates, alters, and/or amplifies endogenous polynucleotides. For example, techniques known in the art may be used to operably associate heterologous control regions (e.g., promoter and/or enhancer) and endogenous polynucleotide sequences via homologous recombination (see, e.g., U.S. Pat. No. 5,641,670, issued Jun. 24, 1997; International Publication No. WO 96/29411, published Sep. 26, 1996; International Publication No. WO 94/12650, published Aug. 4, 1994; Koller et al., Proc. Natl. Acad. Sci. USA 86:8932-8935 (1989); and Zijlstra et al., Nature 342:435-438 (1989), the disclosures of each of which are incorporated by reference in their entireties).

[0207] In addition, polypeptides of the invention can be chemically synthesized using techniques known in the art (e.g., see Creighton, 1983, Proteins: Structures and Molecular Principles, W. H. Freeman & Co., N.Y., and Hunkapiller et al., Nature, 310:105-111 (1984)). For example, a polypeptide corresponding to a fragment of a polypeptide can be synthesized by use of a peptide synthesizer. Furthermore, if desired, nonclassical amino acids or chemical amino acid analogs can be introduced as a substitution or addition into the polypeptide sequence. Non-classical amino acids include, but are not limited to, to the D-isomers of the common amino acids, 2,4-diaminobutyric acid, a-amino isobutyric acid, 4-aminobutyric acid, Abu, 2-amino butyric acid, g-Abu, e-Ahx, 6-amino hexanoic acid, Aib, 2-amino isobutyric acid, 3-amino propionic acid, ornithine, norleucine, norvaline, hydroxyproline, sarcosine, citrulline, homocitrulline, cysteic acid, t-butylglycine, t-butylalanine, phenylglycine, cyclohexylalanine, b-alanine, fluoro-amino acids, designer amino acids such as b-methyl amino acids, Ca-methyl amino acids, Na-methyl amino acids, and amino acid analogs in general. Furthermore, the amino acid can be D (dextrorotary) or L (levorotary).

[0208] The invention encompasses polypeptides of the present invention which are differentially modified during or after translation, e.g., by glycosylation, acetylation, phosphorylation, amidation, derivatization by known protecting/blocking groups, proteolytic cleavage, linkage to an antibody molecule or other cellular ligand, etc. Any of numerous chemical modifications may be carried out by known techniques, including but not limited, to specific chemical cleavage by cyanogen bromide, trypsin, chymotrypsin, papain, V8 protease, NaBH₄; acetylation, formylation, oxidation, reduction; metabolic synthesis in the presence of tunicamycin; etc.

[0209] Additional post-translational modifications encompassed by the invention include, for example, e.g., N-linked or O-linked carbohydrate chains, processing of N-terminal or C-terminal ends), attachment of chemical moieties to the amino acid backbone, chemical modifications of N-linked or O-linked carbohydrate chains, and addition or deletion of an N-terminal methionine residue as a result of procaryotic host cell expression. The polypeptides may also be modified with a detectable label, such as an enzymatic, fluorescent, isotopic or affinity label to allow for detection and isolation of the protein.

[0210] Examples of suitable enzymes include horseradish peroxidase, alkaline phosphatase, beta-galactosidase, or acetylcholinesterase; examples of suitable prosthetic group complexes include streptavidinlbiotin and avidin/biotin; examples of suitable fluorescent materials include umbelliferone, fluorescein, fluorescein isothiocyanate, rhodamine, dichlorotriazinylamine fluorescein, dansyl chloride or phycoerythrin; an example of a luminescent material includes luminol; examples of bioluminescent materials include luciferase, luciferin, and aequorin; and examples of suitable radioactive material include iodine (¹²¹I, ¹²³I, ¹²⁵I, ¹³¹I), carbon (¹⁴C), sulfur (³⁵S), tritium (³H), indium (¹¹¹In, ¹¹²In, ^{113m}In, ^{115m}In), technetium (⁹⁹Tc, ^{99m}Tc), thallium (²⁰¹Ti), gallium (⁶⁸Ga, ⁶⁷Ga), palladium (¹⁰³Pd), molybdenum (⁹⁹Mo), xenon (³³Xe), fluorine (¹⁸F), ⁵³Sm, ¹⁷⁷Lu, ¹⁵⁹Gd, ¹⁴⁹Pm, ¹⁴⁰La, ¹⁷⁵Yb, ¹⁶⁶Ho, ⁹⁰Y, ⁴⁷Sc, ¹⁸⁶Re, ¹⁸⁸Re, ¹⁴²Pr, ¹⁰⁵Rh, and ⁹⁷Ru.

[0211] In specific embodiments, a polypeptide of the present invention or fragment or variant thereof is attached to macrocyclic chelators that associate with radiometal ions, including but not limited to, ¹⁷⁷Lu, ⁹⁰Y, ¹⁶⁶Ho, and ¹⁵³Sm, to polypeptides. In a preferred embodiment, the radiometal ion associated with the macrocyclic chelators is ¹¹¹In. In another preferred embodiment, the radiometal ion associated with the macrocyclic chelator is ⁹⁰Y. In specific embodiments, the macrocyclic chelator is 1,4,7,10-tetraazacyclododecane-N,N′,N″,N′″-tetraacetic acid (DOTA). In other specific embodiments, DOTA is attached to an antibody of the invention or fragment thereof via a linker molecule. Examples of linker molecules useful for conjugating DOTA to a polypeptide are commonly known in the art—see, for example, DeNardo et al., Clin Cancer Res. 4(10):2483-90 (1998); Peterson et al., Bioconjug. Chem. 10(4):553-7 (1999); and Zimmerman et al, Nucl. Med. Biol. 26(8):943-50 (1999); which are hereby incorporated by reference in their entirety.

[0212] As mentioned, the excretory system associated proteins of the invention may be modified by either natural processes, such as posttranslational processing, or by chemical modification techniques which are well known in the art. It will be appreciated that the same type of modification may be present in the same or varying degrees at several sites in a given excretory system associated polypeptide. excretory system associated polypeptides may be branched, for example, as a result of ubiquitination, and they may be cyclic, with or without branching. Cyclic, branched, and branched cyclic excretory system associated polypeptides may result from posttranslation natural processes or may be made by synthetic methods. Modifications include acetylation, acylation, ADP-ribosylation, amidation, covalent attachment of flavin, covalent attachment of a heme moiety, covalent attachment of a nucleotide or nucleotide derivative, covalent attachment of a lipid or lipid derivative, covalent attachment of phosphotidylinositol, cross-linking, cyclization, disulfide bond formation, demethylation, formation of covalent cross-links, formation of cysteine, formation of pyroglutamate, formylation, gamma-carboxylation, glycosylation, GPI anchor formation, hydroxylation, iodination, methylation, myristoylation, oxidation, pegylation, proteolytic processing, phosphorylation, prenylation, racemization, selenoylation, sulfation, transfer-RNA mediated addition of amino acids to proteins such as arginylation, and ubiquitination. (See, for instance, PROTEINS—STRUCTURE AND MOLECULAR PROPERTIES, 2nd Ed., T. E. Creighton, W. H. Freeman and Company, New York (1993); POSTTRANSLATIONAL COVALENT MODIFICATION OF PROTEINS, B. C. Johnson, Ed., Academic Press, New York, pgs. 1-12 (1983); Seifter et al., Meth. Enzymol. 182:626-646 (1990); Rattan et al., Ann. N.Y. Acad. Sci. 663:48-62 (1992)).

[0213] Also provided by the invention are chemically modified derivatives of the polypeptides of the invention which may provide additional advantages such as increased solubility, stability and circulating time of the polypeptide, or decreased immunogenicity (see U.S. Pat. No. 4,179,337). The chemical moieties for derivitization may be selected from water soluble polymers such as polyethylene glycol, ethylene glycoupropylene glycol copolymers, carboxymethylcellulose, dextran, polyvinyl alcohol and the like. The polypeptides may be modified at random positions within the molecule, or at predetermined positions within the molecule and may include one, two, three or more attached chemical moieties.

[0214] The polymer may be of any molecular weight, and may be branched or unbranched. For polyethylene glycol, the preferred molecular weight is between about 1 kDa and about 100 kDa (the term “about” indicating that in preparations of polyethylene glycol, some molecules will weigh more, some less, than the stated molecular weight) for ease in handling and manufacturing. Other sizes may be used, depending on the desired therapeutic profile (e.g., the duration of sustained release desired, the effects, if any on biological activity, the ease in handling, the degree or lack of antigenicity and other known effects of the polyethylene glycol to a therapeutic protein or analog). For example, the polyethylene glycol may have an average molecular weight of about 200, 500, 1000, 1500, 2000, 2500, 3000, 3500, 4000, 4500, 5000, 5500, 6000, 6500, 7000, 7500, 8000, 8500, 9000, 9500, 10,000, 10,500, 11,000, 11,500, 12,000, 12,500, 13,000, 13,500, 14,000, 14,500, 15,000, 15,500, 16,000, 16,500, 17,000, 17,500, 18,000, 18,500, 19,000, 19,500, 20,000, 25,000, 30,000, 35,000, 40,000, 50,000, 55,000, 60,000, 65,000, 70,000, 75,000, 80,000, 85,000, 90,000, 95,000, or 100,000 kDa.

[0215] As noted above, the polyethylene glycol may have a branched structure. Branched polyethylene glycols are described, for example, in U.S. Pat. No. 5,643,575; Morpurgo et al., Appl. Biochem. Biotechnol. 56:59-72 (1996); Vorobjev et al., Nucleosides Nucleotides 18:2745-2750 (1999); and Caliceti et al., Bioconjug. Chem. 10:638-646 (1999), the disclosures of each of which are incorporated herein by reference.

[0216] The polyethylene glycol molecules (or other chemical moieties) should be attached to the protein with consideration of effects on functional or antigenic domains of the protein. There are a number of attachment methods available to those skilled in the art, such as, for example, the method disclosed in EP 0 401 384 (coupling PEG to G-CSF), herein incorporated by reference; see also Malik et al., Exp. Hematol. 20:1028-1035 (1992), reporting pegylation of GM-CSF using tresyl chloride. For example, polyethylene glycol may be covalently bound through amino acid residues via a reactive group, such as a free amino or carboxyl group. Reactive groups are those to which an activated polyethylene glycol molecule may be bound. The amino acid residues having a free amino group may include lysine residues and the N-terminal amino acid residues; those having a free carboxyl group may include aspartic acid residues glutamic acid residues and the C-terminal amino acid residue. Sulfhydryl groups may also be used as a reactive group for attaching the polyethylene glycol molecules. Preferred for therapeutic purposes is attachment at an amino group, such as attachment at the N-terminus or lysine group.

[0217] As suggested above, polyethylene glycol may be attached to proteins via linkage to any of a number of amino acid residues. For example, polyethylene glycol can be linked to proteins via covalent bonds to lysine, histidine, aspartic acid, glutamic acid, or cysteine residues. One or more reaction chemistries may be employed to attach polyethylene glycol to specific amino acid residues (e.g., lysine, histidine, aspartic acid, glutamic acid, or cysteine) of the protein or to more than one type of amino acid residue (e.g., lysine, histidine, aspartic acid, glutamic acid, cysteine and combinations thereof) of the protein.

[0218] One may specifically desire proteins chemically modified at the N-terminus. Using polyethylene glycol as an illustration of the present composition, one may select from a variety of polyethylene glycol molecules (by molecular weight, branching, etc.), the proportion of polyethylene glycol molecules to protein (polypeptide) molecules in the reaction mix, the type of pegylation reaction to be performed, and the method of obtaining the selected N-terminally pegylated protein. The method of obtaining the N-terminally pegylated preparation (i.e., separating this moiety from other monopegylated moieties if necessary) may be by purification of the N-terminally pegylated material from a population of pegylated protein molecules. Selective proteins chemically modified at the N-terminus modification may be accomplished by reductive alkylation which exploits differential reactivity of different types of primary amino groups (lysine versus the N-terminal) available for derivatization in a particular protein. Under the appropriate reaction conditions, substantially selective derivatization of the protein at the N-terminus with a carbonyl group containing polymer is achieved.

[0219] As indicated above, pegylation of the proteins of the invention may be accomplished by any number of means. For example, polyethylene glycol may be attached to the protein either directly or by an intervening linker. Linkerless systems for attaching polyethylene glycol to proteins are described in Delgado et al., Crit. Rev. Thera. Drug Carrier Sys. 9:249-304 (1992); Francis et al., Intern. J. of Hematol. 68:1-18 (1998); U.S. Pat. No. 4,002,531; U.S. Pat. No. 5,349,052; WO 95/06058; and WO 98/32466, the disclosures of each of which are incorporated herein by reference.

[0220] One system for attaching polyethylene glycol directly to amino acid residues of proteins without an intervening linker employs tresylated MPEG, which is produced by the modification of monmethoxy polyethylene glycol (MPEG) using tresylchloride (CISO₂CH₂CF₃). Upon reaction of protein with tresylated MPEG, polyethylene glycol is directly attached to amine groups of the protein. Thus, the invention includes protein-polyethylene glycol conjugates produced by reacting proteins of the invention with a polyethylene glycol molecule having a 2,2,2-trifluoreothane sulphonyl group.

[0221] Polyethylene glycol can also be attached to proteins using a number of different intervening linkers. For example, U.S. Pat. No. 5,612,460, the entire disclosure of which is incorporated herein by reference, discloses urethane linkers for connecting polyethylene glycol to proteins. Protein-polyethylene glycol conjugates wherein the polyethylene glycol is attached to the protein by a linker can also be produced by reaction of proteins with compounds such as MPEG-succinimidylsuccinate, MPEG activated with 1,1′-carbonyldiimidazole, MPEG-2,4,5-trichloropenylcarbonate, MPEG-p-nitrophenolcarbonate, and various MPEG-succinate derivatives. A number of additional polyethylene glycol derivatives and reaction chemistries for attaching polyethylene glycol to proteins are described in International Publication No. WO 98/32466, the entire disclosure of which is incorporated herein by reference. Pegylated protein products produced using the reaction chemistries set out herein are included within the scope of the invention.

[0222] The number of polyethylene glycol moieties attached to each protein of the invention (i.e., the degree of substitution) may also vary. For example, the pegylated proteins of the invention may be linked, on average, to 1, 2, 3, 4, 5, 6, 7, 8, 9, 10, 12, 15, 17, 20, or more polyethylene glycol molecules. Similarly, the average degree of substitution within ranges such as 1-3, 2-4, 3-5, 4-6, 5-7, 6-8, 7-9, 8-10, 9-11, 10-12, 11-13, 12-14, 13-15, 14-16, 15-17, 16-18, 17-19, or 18-20 polyethylene glycol moieties per protein molecule. Methods for determining the degree of substitution are discussed, for example, in Delgado et al., Crit. Rev. Thera. Drug Carrier Sys. 9:249-304 (1992).

[0223] The excretory system associated polypeptides of the invention can be recovered and purified from chemical synthesis and recombinant cell cultures by standard methods which include, but are not limited to, ammonium sulfate or ethanol precipitation, acid extraction, anion or cation exchange chromatography, phosphocellulose chromatography, hydrophobic interaction chromatography, affinity chromatography, hydroxylapatite chromatography and lectin chromatography. Most preferably, high performance liquid chromatography (“HPLC”) is employed for purification. Well known techniques for refolding protein may be employed to regenerate active conformation when the polypeptide is denatured during isolation and/or purification.

[0224] Excretory system associated polynucleotides and polypeptides may be used in accordance with the present invention for a variety of applications, particularly those that make use of the chemical and biological properties of excretory system associated antigens. Among these are applications in the detection, prevention, diagnosis and/or treatment of diseases associated with excretory system, such as e.g., excretory system cancer, tumors, renal disorders (e.g., kidney failure, nephritis, blood vessel disorders of kidney, metabolic and congenital kidney disorders, urinary disorders of the kidney, autoimmune disorders, sclerosis and necrosis, and electrolyte imbalance, and kidney cancer), bladder disorders (e.g, urinary tract infection, bladder obstruction, urination disorders, and bladder cancer), urether disorders (e.g., obstruction of the ureter and ureter cancer), urethra disorders (e.g., obstruction of the urethra and urethra cancers) and/or those disorders as discribed under “Urinary System Disorders” below. Additional applications relate to diagnosis and to treatment of disorders of cells, tissues and organisms. These aspects of the invention are discussed further below.

[0225] In a preferred embodiment, polynucleotides expressed in a particular tissue type are used to detect, diagnose, treat, prevent and/or prognose disorders associated with the tissue type.

[0226] The polypeptides of the invention may be in monomers or multimers (i.e., dimers, trimers, tetramers and higher multimers). Accordingly, the present invention relates to monomers and multimers of the polypeptides of the invention, their preparation, and compositions (preferably, Therapeutics) containing them. In specific embodiments, the polypeptides of the invention are monomers, dimers, trimers or tetramers. In additional embodiments, the multimers of the invention are at least dimers, at least trimers, or at least tetramers.

[0227] Multimers encompassed by the invention may be homomers or heteromers. As used herein, the term homomer refers to a multimer containing only polypeptides corresponding to a protein of the invention (e.g., the amino acid sequence of SEQ ID NO: Y, an amino acid sequence encoded by SEQ ID NO: X or the complement of SEQ ID NO: X, the amino acid sequence encoded by the portion of SEQ ID NO: X as defined in columns 8 and 9 of Table 2, and/or an amino acid sequence encoded by cDNA contained in Clone ID NO: Z (including fragments, variants, splice variants, and fusion proteins, corresponding to these as described herein)). These homomers may contain polypeptides having identical or different amino acid sequences. In a specific embodiment, a homomer of the invention is a multimer containing only polypeptides having an identical amino acid sequence. In another specific embodiment, a homomer of the invention is a multimer containing polypeptides having different amino acid sequences. In specific embodiments, the multimer of the invention is a homodimer (e.g., containing two polypeptides having identical or different amino acid sequences) or a homotrimer (e.g., containing three polypeptides having identical and/or different amino acid sequences). In additional embodiments, the homomeric multimer of the invention is at least a homodimer, at least a homotrimer, or at least a homotetramer.

[0228] As used herein, the term heteromer refers to a multimer containing two or more heterologous polypeptides (i.e., polypeptides of different proteins) in addition to the polypeptides of the invention. In a specific embodiment, the multimer of the invention is a heterodimer, a heterotrimer, or a heterotetramer. In additional embodiments, the heteromeric multimer of the invention is at least a heterodimer, at least a heterotrimer, or at least a heterotetramer.

[0229] Multimers of the invention may be the result of hydrophobic, hydrophilic, ionic and/or covalent associations and/or may be indirectly linked by, for example, liposome formation. Thus, in one embodiment, multimers of the invention, such as, for example, homodimers or homotrimers, are formed when polypeptides of the invention contact one another in solution. In another embodiment, heteromultimers of the invention, such as, for example, heterotrimers or heterotetramers, are formed when polypeptides of the invention contact antibodies to the polypeptides of the invention (including antibodies to the heterologous polypeptide sequence in a fusion protein of the invention) in solution. In other embodiments, multimers of the invention are formed by covalent associations with and/or between the polypeptides of the invention. Such covalent associations may involve one or more amino acid residues contained in the polypeptide sequence (e.g., that recited in SEQ ID NO: Y, encoded by the portion of SEQ ID NO: X as defined in columns 8 and 9 of Table 2, and/or encoded by the cDNA contained in Clone ID NO: Z). In one instance, the covalent associations are cross-linking between cysteine residues located within the polypeptide sequences which interact in the native (i.e., naturally occurring) polypeptide. In another instance, the covalent associations are the consequence of chemical or recombinant manipulation. Alternatively, such covalent associations may involve one or more amino acid residues contained in the heterologous polypeptide sequence in a fusion protein. In one example, covalent associations are between the heterologous sequence contained in a fusion protein of the invention (see, e.g., U.S. Pat. No. 5,478,925). In a specific example, the covalent associations are between the heterologous sequence contained in a Fc fusion protein of the invention (as described herein). In another specific example, covalent associations of fusion proteins of the invention are between heterologous polypeptide sequence from another protein that is capable of forming covalently associated multimers, such as for example, osteoprotegerin (see, e.g., International Publication NO: WO 98/49305, the contents of which are herein incorporated by reference in its entirety). In another embodiment, two or more polypeptides of the invention are joined through peptide linkers. Examples include those peptide linkers described in U.S. Pat. No. 5,073,627 (hereby incorporated by reference). Proteins comprising multiple polypeptides of the invention separated by peptide linkers may be produced using conventional recombinant DNA technology.

[0230] Another method for preparing multimer polypeptides of the invention involves use of polypeptides of the invention fused to a leucine zipper or isoleucine zipper polypeptide sequence. Leucine zipper and isoleucine zipper domains are polypeptides that promote multimerization of the proteins in which they are found. Leucine zippers were originally identified in several DNA-binding proteins (Landschulz et al., Science 240:1759, (1988)), and have since been found in a variety of different proteins. Among the known leucine zippers are naturally occurring peptides and derivatives thereof that dimerize or trimerize. Examples of leucine zipper domains suitable for producing soluble multimeric proteins of the invention are those described in PCT application WO 94/10308, hereby incorporated by reference. Recombinant fusion proteins comprising a polypeptide of the invention fused to a polypeptide sequence that dimerizes or trimerizes in solution are expressed in suitable host cells, and the resulting soluble multimeric fusion protein is recovered from the culture supernatant using techniques known in the art.

[0231] Trimeric polypeptides of the invention may offer the advantage of enhanced biological activity. Preferred leucine zipper moieties and isoleucine moieties are those that preferentially form trimers. One example is a leucine zipper derived from lung surfactant protein D (SPD), as described in Hoppe et al. (FEBS Letters 344:191, (1994)) and in U.S. patent application Ser. No. 08/446,922, hereby incorporated by reference. Other peptides derived from naturally occurring trimeric proteins may be employed in preparing trimeric polypeptides of the invention

[0232] In another example, proteins of the invention are associated by interactions between Flag® polypeptide sequence contained in fusion proteins of the invention containing Flag® polypeptide sequence. In a further embodiment, proteins of the invention are associated by interactions between heterologous polypeptide sequence contained in Flag® fusion proteins of the invention and anti-Flag® antibody.

[0233] The multimers of the invention may be generated using chemical techniques known in the art. For example, polypeptides desired to be contained in the multimers of the invention may be chemically cross-linked using linker molecules and linker molecule length optimization techniques known in the art (see, e.g., U.S. Pat. No. 5,478,925, which is herein incorporated by reference in its entirety). Additionally, multimers of the invention may be generated using techniques known in the art to form one or more inter-molecule cross-links between the cysteine residues located within the sequence of the polypeptides desired to be contained in the multimer (see, e.g., U.S. Pat. No. 5,478,925, which is herein incorporated by reference in its entirety). Further, polypeptides of the invention may be routinely modified by the addition of cysteine or biotin to the C-terminus or N-terminus of the polypeptide and techniques known in the art may be applied to generate multimers containing one or more of these modified polypeptides (see, e.g., U.S. Pat. No. 5,478,925, which is herein incorporated by reference in its entirety). Additionally, techniques known in the art may be applied to generate liposomes containing the polypeptide components desired to be contained in the multimer of the invention (see, e.g., U.S. Pat. No. 5,478,925, which is herein incorporated by reference in its entirety).

[0234] Alternatively, multimers of the invention may be generated using genetic engineering techniques known in the art. In one embodiment, polypeptides contained in multimers of the invention are produced recombinantly using fusion protein technology described herein or otherwise known in the art (see, e.g., U.S. Pat. No. 5,478,925, which is herein incorporated by reference in its entirety). In a specific embodiment, polynucleotides coding for a homodimer of the invention are generated by ligating a polynucleotide sequence encoding a polypeptide of the invention to a sequence encoding a linker polypeptide and then further to a synthetic polynucleotide encoding the translated product of the polypeptide in the reverse orientation from the original C-terminus to the N-terminus (lacking the leader sequence) (see, e.g., U..S Pat. No. 5,478,925, which is herein incorporated by reference in its entirety). In another embodiment, recombinant techniques described herein or otherwise known in the art are applied to generate recombinant polypeptides of the invention which contain a transmembrane domain (or hydrophobic or signal peptide) and which can be incorporated by membrane reconstitution techniques into liposomes (see, e.g., U.S. Pat. No. 5,478,925, which is herein incorporated by reference in its entirety).

[0235] Antibodies

[0236] Further polypeptides of the invention relate to antibodies and T-cell antigen receptors (TCR) which immunospecifically bind a polypeptide, polypeptide fragment, or variant of the invention (e.g., a polypeptide or fragment or variant of the amino acid sequence of SEQ ID NO: Y or a polypeptide encoded by the cDNA contained in Clone ID NO: Z, and/or an epitope, of the present invention) as determined by immunoassays well known in the art for assaying specific antibody-antigen binding. Antibodies of the invention include, but are not limited to, polyclonal, monoclonal, multispecific, human, humanized or chimeric antibodies, single chain antibodies, Fab fragments, F(ab′) fragments, fragments produced by a Fab expression library, anti-idiotypic (anti-Id) antibodies (including, e.g., anti-Id antibodies to antibodies of the invention), intracellularly-made antibodies (i.e., intrabodies), and epitope-binding fragments of any of the above. The term “antibody,” as used herein, refers to immunoglobulin molecules and immunologically active portions of immunoglobulin molecules, i.e., molecules that contain an antigen binding site that immunospecifically binds an antigen. The immunoglobulin molecules of the invention can be of any type (e.g., IgG, IgE, IgM, IgD, IgA and IgY), class (e.g., IgG1, IgG2, IgG3, IgG4, IgA1 and IgA2) or subclass of immunoglobulin molecule. In preferred embodiments, the immunoglobulin molecules of the invention are IgG1. In other preferred embodiments, the immunoglobulin molecules of the invention are IgG4.

[0237] Most preferably the antibodies are human antigen-binding antibody fragments of the present invention and include, but are not limited to, Fab, Fab′ and F(ab′)2, Fd, single-chain Fvs (scFv), single-chain antibodies, disulfide-linked Fvs (sdFv) and fragments comprising either a VL or VH domain. Antigen-binding antibody fragments, including single-chain antibodies, may comprise the variable region(s) alone or in combination with the entirety or a portion of the following: hinge region, CH1, CH2, and CH3 domains. Also included in the invention are antigen-binding fragments also comprising any combination of variable region(s) with a hinge region, CH1, CH2, and CH3 domains. The antibodies of the invention may be from any animal origin including birds and mammals. Preferably, the antibodies are human, murine (e.g., mouse and rat), donkey, ship rabbit, goat, guinea pig, camel, horse, or chicken. As used herein, “human” antibodies include antibodies having the amino acid sequence of a human immunoglobulin and include antibodies isolated from human immunoglobulin libraries or from animals transgenic for one or more human immunoglobulin and that do not express endogenous immunoglobulins, as described infra and, for example in, U.S. Pat. No. 5,939,598 by Kucherlapati et al.

[0238] The antibodies of the present invention may be monospecific, bispecific, trispecific or of greater multispecificity. Multispecific antibodies may be specific for different epitopes of a polypeptide of the present invention or may be specific for both a polypeptide of the present invention as well as for a heterologous epitope, such as a heterologous polypeptide or solid support material. See, e.g., PCT publications WO 93/17715; WO 92/08802; WO 91/00360; WO,92/05793; Tutt, et al., J. Immunol. 147:60-69 (1991); U.S. Pat. Nos. 4,474,893; 4,714,681; 4,925,648; 5,573,920; 5,601,819; Kostelny et al., J. Immunol. 148:1547-1553 (1992).

[0239] Antibodies of the present invention may be described or specified in terms of the epitope(s) or portion(s) of a polypeptide of the present invention, which they recognize or specifically bind. The epitope(s) or polypeptide portion(s) may be specified as described herein, e.g., by N-terminal and C-terminal positions, or by size in contiguous amino acid residues, or listed in the Tables and Figures. Preferred epitopes of the invention include those shown in column 6 of Table 1A, as well as polynucleotides that encode these epitopes. Antibodies which specifically bind any epitope or polypeptide of the present invention may also be excluded. Therefore, the present invention includes antibodies that specifically bind polypeptides of the present invention, and allows for the exclusion of the same.

[0240] Antibodies of the present invention may also be described or specified in terms of their cross-reactivity. Antibodies that do not bind any other analog, ortholog, or homolog of a polypeptide of the present invention are included. Antibodies that bind polypeptides with at least 95%, at least 90%, at least 85%, at least 80%, at least 75%, at least 70%, at least 65%, at least 60%, at least 55%, and at least 50% identity (as calculated using methods known in the art and described herein) to a polypeptide of the present invention are also included in the present invention. In specific embodiments, antibodies of the present invention cross-react with murine, rat and/or rabbit homologs of human proteins and the corresponding epitopes thereof. Antibodies that do not bind polypeptides with less than 95%, less than 90%, less than 85%, less than 80%, less than 75%, less than 70%, less than 65%, less than 60%, less than 55%, and less than 50% identity (as calculated using methods known in the art and described herein) to a polypeptide of the present invention are also included in the present invention. In a specific embodiment, the above-described cross-reactivity is with respect to any single specific antigenic or immunogenic polypeptide, or combination(s) of 2, 3, 4, 5, or more of the specific antigenic and/or immunogenic polypeptides disclosed herein. Further included in the present invention are antibodies, which bind polypeptides encoded by polynucleotides which hybridize to a polynucleotide of the present invention under stringent hybridization conditions (as described herein). Antibodies of the present invention may also be described or specified in terms of their binding affinity to a polypeptide of the invention. Preferred binding affinities include those with a dissociation constant or Kd less than 5×10⁻² M, 10⁻² M, 5×10⁻³ M, 10⁻³ M, 5×10⁻⁴ M, 10⁻⁴ M, 5×10⁻⁵ M, 10⁻⁵ M, 5×10⁻⁶ M, 10⁻⁶M, 5×10⁻⁷ M, 10⁷ M, 5×10⁻⁸ M, 10⁻⁸ M, 5×10⁻⁹ M, 10⁻⁹ M, 5×10⁻¹⁰ M, 10⁻¹⁰ M, 5×10⁻¹¹ M, 10⁻¹¹ M, 5×10⁻¹² M, 10⁻¹² M, 5×10⁻¹³ M, 10⁻¹³ M, 5×10⁻¹⁴ M, 10⁻¹⁴ M, 5×10⁻¹⁵ M, or 10⁻¹⁵ M.

[0241] The invention also provides antibodies that competitively inhibit binding of an antibody to an epitope of the invention as determined by any method known in the art for determining competitive binding, for example, the immunoassays described herein. In preferred embodiments, the antibody competitively inhibits binding to the epitope by at least 95%, at least 90%, at least 85%, at least 80%, at least 75%, at least 70%, at least 60%, or at least 50%.

[0242] Antibodies of the present invention may act as agonists or antagonists of the polypeptides of the present invention. For example, the present invention includes antibodies, which disrupt the receptor/ligand interactions with the polypeptides of the invention either partially or fully. Preferably, antibodies of the present invention bind an antigenic epitope disclosed herein, or a portion thereof. The invention features both receptor-specific antibodies and ligand-specific antibodies. The invention also features receptor-specific antibodies, which do not prevent ligand binding but prevent receptor activation. Receptor activation (i.e., signaling) may be determined by techniques described herein or otherwise known in the art. For example, receptor activation can be determined by detecting the phosphorylation (e.g., tyrosine or serine/threonine) of the receptor or its substrate by immunoprecipitation followed by western blot analysis (for example, as described supra). In specific embodiments, antibodies are provided that inhibit ligand activity or receptor activity by at least 95%, at least 90%, at least 85%, at least 80%, at least 75%, at least 70%, at least 60%, or at least 50% of the activity in absence of the antibody.

[0243] The invention also features receptor-specific antibodies which both prevent ligand binding and receptor activation as well as antibodies that recognize the receptor-ligand complex, and, preferably, do not specifically recognize the unbound receptor or the unbound ligand. Likewise, included in the invention are neutralizing antibodies which bind the ligand and prevent binding of the ligand to the receptor, as well as antibodies which bind the ligand, thereby preventing receptor activation, but do not prevent the ligand from binding the receptor. Further included in the invention are antibodies, which activate the receptor. These antibodies may act as receptor agonists, i.e., potentiate or activate either all or a subset of the biological activities of the ligand-mediated receptor activation, for example, by inducing dimerization of the receptor. The antibodies may be specified as agonists, antagonists or inverse agonists for biological activities comprising the specific biological activities of the peptides of the invention disclosed herein. The above antibody agonists can be made using methods known in the art. See, e.g., PCT publication WO 96/40281; U.S. Pat. No. 5,811,097; Deng et al., Blood 92(6):1981-1988 (1998); Chen et al., Cancer Res. 58(16):3668-3678 (1998); Harrop et al., J. Immunol. 161(4):1786-1794 (1998); Zhu et al., Cancer Res. 58(15):3209-3214 (1998); Yoon et al., J. Immunol. 160(7):3170-3179 (1998); Prat et al., J. Cell. Sci. 111(Pt2):237-247 (1998); Pitard et al., J. Immunol. Methods 205(2):177-190 (1997); Liautard et al., Cytokine 9(4):233-241 (1997); Carlson et al., J. Biol. Chem. 272(17):11295-11301 (1997); Taryman et al., Neuron 14(4):755-762 (1995); Muller et al., Structure 6(9):1153-1167 (1998); Bartunek et al., Cytokine 8(1):14-20 (1996) (which are all incorporated by reference herein in their entireties).

[0244] Antibodies of the present invention may be used, for example, to purify, detect, and target the polypeptides of the present invention, including both in vitro and in vivo diagnostic and therapeutic methods. For example, the antibodies have utility in immunoassays for qualitatively and quantitatively measuring levels of the polypeptides of the present invention in biological samples. See, e.g., Harlow et al., Antibodies: A Laboratory Manual, (Cold Spring Harbor Laboratory Press, 2nd ed. 1988); incorporated by reference herein in its entirety.

[0245] As discussed in more detail below, the antibodies of the present invention may be used either alone or in combination with other compositions. The antibodies may further be recombinantly fused to a heterologous polypeptide at the N- or C-terminus or chemically conjugated (including covalent and non-covalent conjugations) to polypeptides or other compositions. For example, antibodies of the present invention may be recombinantly fused or conjugated to molecules useful as labels in detection assays and effector molecules such as heterologous polypeptides, drugs, radionuclides, or toxins. See, e.g., PCT publications WO 92/08495; WO 91/14438; WO 89/12624; U.S. Pat. No. 5,314,995; and EP 396,387; the disclosures of which are incorporated herein by reference in their entireties.

[0246] The antibodies of the invention include derivatives that are modified, i.e., by the covalent attachment of any type of molecule to the antibody such that covalent attachment does not prevent the antibody from generating an anti-idiotypic response. For example, but not by way of limitation, the antibody derivatives include antibodies that have been modified, e.g., by glycosylation, acetylation, pegylation, phosphylation, amidation, derivatization by known protecting/blocking groups, proteolytic cleavage, linkage to a cellular ligand or other protein, etc. Any of numerous chemical modifications may be carried out by known techniques, including, but not limited to specific chemical cleavage, acetylation, formylation, metabolic synthesis of tunicamycin, etc. Additionally, the derivative may contain one or more non-classical amino acids.

[0247] The antibodies of the present invention may be generated by any suitable method known in the art. Polyclonal antibodies to an antigen-of-interest can be produced by various procedures well known in the art. For example, a polypeptide of the invention can be administered to various host animals including, but not limited to, rabbits, mice, rats, etc. to induce the production of sera containing polyclonal antibodies specific for the antigen. Various adjuvants may be used to increase the immunological response, depending on the host species, and include but are not limited to, Freund's (complete and incomplete), mineral gels such as aluminum hydroxide, surface active substances such as lysolecithin, pluronic polyols, polyanions, peptides, oil emulsions, keyhole limpet hemocyanins, dinitrophenol, and potentially useful human adjuvants such as BCG (bacille Calmette-Guerin) and corynebacterium parvum. Such adjuvants are also well known in the art.

[0248] Monoclonal antibodies can be prepared using a wide variety of techniques known in the art including the use of hybridoma, recombinant, and phage display technologies, or a combination thereof. For example, monoclonal antibodies can be produced using hybridoma techniques including those known in the art and taught, for example, in Harlow et al., Antibodies: A Laboratory Manual, (Cold Spring Harbor Laboratory Press, 2nd ed. 1988); Hammerling, et al., in: Monoclonal Antibodies and T-Cell Hybridomas 563-681 (Elsevier, N.Y., 1981) (said references incorporated by reference in their entireties). The term “monoclonal antibody” as used herein is not limited to antibodies produced through hybridoma technology. The term “monoclonal antibody” refers to an antibody that is derived from a single clone, including any eukaryotic, prokaryotic, or phage clone, and not the method by which it is produced.

[0249] Methods for producing and screening for specific antibodies using hybridoma technology are routine and well known in the art and are discussed in detail in the Examples. In a non-limiting example, mice can be immunized with a polypeptide of the invention or a cell expressing such peptide. Once an immune response is detected, e.g., antibodies specific for the antigen are detected in the mouse serum, the mouse spleen is harvested and splenocytes isolated. The splenocytes are then fused by well known techniques to any suitable myeloma cells, for example cells from cell line SP20 available from the ATCC. Hybridomas are selected and cloned by limited dilution. The hybridoma clones are then assayed by methods known in the art for cells that secrete antibodies capable of binding a polypeptide of the invention. Ascites fluid, which generally contains high levels of antibodies, can be generated by immunizing mice with positive hybridoma clones.

[0250] Accordingly, the present invention provides methods of generating monoclonal antibodies as well as antibodies produced by the method comprising culturing a hybridoma cell secreting an antibody of the invention wherein, preferably, the hybridoma is generated by fusing splenocytes isolated from a mouse immunized with an antigen of the invention with myeloma cells and then screening the hybridomas resulting from the fusion for hybridoma clones that secrete an antibody able to bind a polypeptide of the invention.

[0251] Another well known method for producing both polyclonal and monoclonal human B cell lines is transformation using Epstein Barr Virus (EBV). Protocols for generating EBV-transformed B cell lines are commonly known in the art, such as, for example, the protocol outlined in Chapter 7.22 of Current Protocols in Immunology, Coligan et al., Eds., 1994, John Wiley & Sons, NY, which is hereby incorporated in its entirety by reference herein. The source of B cells for transformation is commonly human peripheral blood, but B cells for transformation may also be derived from other sources including, but not limited to, lymph nodes, tonsil, spleen, tumor tissue, and infected tissues. Tissues are generally made into single cell suspensions prior to EBV transformation. Additionally, steps may be taken to either physically remove or inactivate T cells (e.g., by treatment with cyclosporin A) in B cell-containing samples, because T cells from individuals seropositive for anti-EBV antibodies can suppress B cell immortalization by EBV.

[0252] In general, the sample containing human B cells is innoculated with EBV, and cultured for 3-4 weeks. A typical source of EBV is the culture supernatant of the B95-8 cell line (ATCC #VR-1492). Physical signs of EBV transformation can generally be seen towards the end of the 3-4 week culture period. By phase-contrast microscopy, transformed cells may appear large, clear, hairy and tend to aggregate in tight clusters of cells. Initially, EBV lines are generally polyclonal. However, over prolonged periods of cell cultures, EBV lines may become monoclonal or polyclonal as a result of the selective outgrowth of particular B cell clones. Alternatively, polyclonal EBV transformed lines may be subcloned (e.g., by limiting dilution culture) or fused with a suitable fusion partner and plated at limiting dilution to obtain monoclonal B cell lines. Suitable fusion partners for EBV transformed cell lines include mouse myeloma cell lines (e.g., SP2/0, X63-Ag8.653), heteromyeloma cell lines (human x mouse; e.g, SPAM-8, SBC-H20, and CB-F7), and human cell lines (e.g., GM 1500, SKO-007, RPMI 8226, and KR-4). Thus, the present invention also provides a method of generating polyclonal or monoclonal human antibodies against polypeptides of the invention or fragments thereof, comprising EBV-transformation of human B cells.

[0253] Antibody fragments, which recognize specific epitopes may be generated by known techniques. For example, Fab and F(ab′)2 fragments of the invention may be produced by proteolytic cleavage of immunoglobulin molecules, using enzymes such as papain (to produce Fab fragments) or pepsin (to produce F(ab′)2 fragments). F(ab′)2 fragments contain the variable region, the light chain constant region and the CH1 domain of the heavy chain. For example, the antibodies of the present invention can also be generated using various phage display methods known in the art and as discussed in detail in the Examples (e.g., Example 10). In phage display methods, functional antibody domains are displayed on the surface of phage particles, which carry the polynucleotide sequences encoding them. In a particular embodiment, such phage can be utilized to display antigen-binding domains expressed from a repertoire or combinatorial antibody library (e.g., human or murine). Phage expressing an antigen binding domain that binds the antigen of interest can be selected or identified with antigen, e.g., using labeled antigen or antigen bound or captured to a solid surface or bead. Phage used in these methods are typically filamentous phage including fd and M13 binding domains expressed from phage with Fab, Fv or disulfide stabilized Fv antibody domains recombinantly fused to either the phage gene III or gene VIII protein. Examples of phage display methods that can be used to make the antibodies of the present invention include those disclosed in Brinkman et al., J. Immunol. Methods 182:41-50 (1995); Ames et al., J. Immunol. Methods 184:177-186 (1995); Kettleborough et al., Eur. J. Immunol. 24:952-958 (1994); Persic et al., Gene 187 9-18 (1997); Burton et al., Advances in Immunology 57:191-280 (1994); PCT application No. PCT/GB91/01134; PCT publications WO 90/02809; WO 91/10737; WO 92/01047; WO 92/18619; WO 93/11236; WO 95/15982; WO 95/20401; and U.S. Pat. Nos. 5,698,426; 5,223,409; 5,403,484; 5,580,717; 5,427,908; 5,750,753; 5,821,047; 5,571,698; 5,427,908; 5,516,637; 5,780,225; 5,658,727; 5,733,743 and 5,969,108; each of which is incorporated herein by reference in its entirety.

[0254] As described in the above references, after phage selection, the antibody coding regions from the phage can be isolated and used to generate whole antibodies, including human antibodies, or any other desired antigen binding fragment, and expressed in any desired host, including mammalian cells, insect cells, plant cells, yeast, and bacteria, e.g., as described in detail below. For example, techniques to recombinantly produce Fab, Fab′ and F(ab′)2 fragments can also be employed using methods known in the art such as those disclosed in PCT publication WO 92/22324; Mullinax et al., BioTechniques 12(6):864-869 (1992); and Sawai et al., AJRI 34:26-34 (1995); and Better et al., Science 240:1041-1043 (1988) (said references incorporated by reference in their entireties).

[0255] Examples of techniques which can be used to produce single-chain Fvs and antibodies include those described in U.S. Pat. Nos. 4,946,778 and 5,258,498; Huston et al., Methods in Enzymology 203:46-88 (1991); Shu et al., PNAS 90:7995-7999 (1993); and Skerra et al., Science 240:1038-1040 (1988). For some uses, including in vivo use of antibodies in humans and in vitro detection assays, it may be preferable to use chimeric, humanized, or human antibodies. A chimeric antibody is a molecule in which different portions of the antibody are derived from different animal species, such as antibodies having a variable region derived from a murine monoclonal antibody and a human immunoglobulin constant region. Methods for producing chimeric antibodies are known in the art. See e.g., Morrison, Science 229:1202 (1985); Oi et al., BioTechniques 4:214 (1986); Gillies et al., (1989) J. Immunol. Methods 125:191-202; U.S. Pat. Nos. 5,807,715; 4,816,567; and 4,816397, which are incorporated herein by reference in their entirety. Humanized antibodies are antibody molecules from non-human species antibody that binds the desired antigen having one or more complementarity determining regions (CDRs) from the non-human species and a framework regions from a human immunoglobulin molecule. Often, framework residues in the human framework regions will be substituted with the corresponding residue from the CDR donor antibody to alter, preferably improve, antigen binding. These framework substitutions are identified by methods well known in the art, e.g., by modeling of the interactions of the CDR and framework residues to identify framework residues important for antigen binding and sequence comparison to identify unusual framework residues at particular positions. (See, e.g., Queen et al., U.S. Pat. No. 5,585,089; Riechmann et al., Nature 332:323 (1988), which are incorporated herein by reference in their entireties.) Antibodies can be humanized using a variety of techniques known in the art including, for example, CDR-grafting (EP 239,400; PCT publication WO 91/09967; U.S. Pat. Nos. 5,225,539; 5,530,101; and 5,585,089), veneering or resurfacing (EP 592,106; EP 519,596; Padlan, Molecular Immunology 28(⅘):489-498 (1991); Studnicka et al., Protein Engineering 7(6):805-814 (1994); Roguska. et al., PNAS 91:969-973 (1994)), and chain shuffling (U.S. Pat. No. 5,565,332).

[0256] Completely human antibodies are particularly desirable for therapeutic treatment of human patients. Human antibodies can be made by a variety of methods known in the art including phage display methods described above using antibody libraries derived from human immunoglobulin sequences. See also, U.S. Pat. Nos. 4,444,887 and 4,716,111; and PCT publications WO 98/46645, WO 98/50433, WO 98/24893, WO 98/16654, WO 96/34096, WO 96/33735, and WO 91/10741; each of which is incorporated herein by reference in its entirety.

[0257] Human antibodies can also be produced using transgenic mice which are incapable of expressing functional endogenous immunoglobulins, but which can express human immunoglobulin genes. For example, the human heavy and light chain immunoglobulin gene complexes may be introduced randomly or by homologous recombination into mouse embryonic stem cells. Alternatively, the human variable region, constant region, and diversity region may be introduced into mouse embryonic stem cells in addition to the human heavy and light chain genes. The mouse heavy and light chain immunoglobulin genes may be rendered non-functional separately or simultaneously with the introduction of human immunoglobulin loci by homologous recombination. In particular, homozygous deletion of the JH region prevents endogenous antibody production. The modified embryonic stem cells are expanded and microinjected into blastocysts to produce chimeric mice. The chimeric mice are then bred to produce homozygous offspring, which express human antibodies. The transgenic mice are immunized in the normal fashion with a selected antigen, e.g., all or a portion of a polypeptide of the invention. Monoclonal antibodies directed against the antigen can be obtained from the immunized, transgenic mice using conventional hybridoma technology. The human immunoglobulin transgenes harbored by the transgenic mice rearrange during B cell differentiation, and subsequently undergo class switching and somatic mutation. Thus, using such a technique, it is possible to produce therapeutically useful IgG, IgA, IgM and IgE antibodies. For an overview of this technology for producing human antibodies, see Lonberg and Huszar, Int. Rev. Immunol. 13:65-93 (1995). For a detailed discussion of this technology for producing human antibodies and human monoclonal antibodies and protocols for producing such antibodies, see, e.g., PCT publications WO 98/24893; WO 92/01047; WO 96/34096; WO 96/33735; European Patent No. 0 598 877; U.S. Pat. Nos. 5,413,923; 5,625,126; 5,633,425; 5,569,825; 5,661,016; 5,545,806; 5,814,318; 5,885,793; 5,916,771; 5,939,598; 6,075,181 and 6,114,598, which are incorporated by reference herein in their entirety. In addition, companies such as Abgenix, Inc. (Freemont, Calif.) and Genpharm (San Jose, Calif.) can be engaged to provide human antibodies directed against a selected antigen using technology similar to that described above.

[0258] Completely human antibodies, which recognize a selected epitope can be generated using a technique referred to as “guided selection.” In this approach a selected non-human monoclonal antibody, e.g., a mouse antibody, is used to guide the selection of a completely human antibody recognizing the same epitope. (Jespers et al., Bio/technology 12:899-903 (1988)).

[0259] Further, antibodies to the polypeptides of the invention can, in turn, be utilized to generate anti-idiotype antibodies that “mimic” polypeptides of the invention using techniques well known to those skilled in the art. (See, e.g., Greenspan & Bona, FASEB J. 7(5):437-444; (1989) and Nissinoff, J. Immunol. 147(8):2429-2438 (1991)). For example, antibodies which bind to and competitively inhibit polypeptide multimerization and/or binding of a polypeptide of the invention to a ligand can be used to generate anti-idiotypes that “mimic” the polypeptide multimerization and/or binding domain and, as a consequence, bind to and neutralize polypeptide and/or its ligand. Such neutralizing anti-idiotypes or Fab fragments of such anti-idiotypes can be used in therapeutic regimens to neutralize polypeptide ligand/receptor. For example, such anti-idiotypic antibodies can be used to bind a polypeptide of the invention and/or to bind its ligand(s)/receptor(s), and thereby block its biological activity. Alternatively, antibodies, which bind to and enhance polypeptide multimerization and/or binding, and/or receptor/ligand multimerization, binding and/or signaling can be used to generate anti-idiotypes that function as agonists of a polypeptide of the invention and/or its ligand/receptor. Such agonistic anti-idiotypes or Fab fragments of such anti-idiotypes can be used in therapeutic regimens as agonists of the polypeptides of the invention or its ligand(s)/receptor(s). For example, such anti-idiotypic antibodies can be used to bind a polypeptide of the invention and/or to bind its ligand(s)/receptor(s), and thereby promote or enhance its biological activity.

[0260] Intrabodies of the invention can be produced using methods known in the art, such as those disclosed and reviewed in Chen et al., Hum. Gene Ther. 5:595-601 (1994); Marasco, W. A., Gene Ther. 4:11-15 (1997); Rondon and Marasco, Annu. Rev. Microbiol. 51:257-283 (1997); Proba et al., J. Mol. Biol. 275:245-253 (1998); Cohen et al., Oncogene 17:2445-2456 (1998); Ohage and Steipe, J. Mol. Biol. 291:1119-1128 (1999); Ohage et al., J. Mol. Biol. 291:1129-1134 (1999); Wirtz and Steipe, Protein Sci. 8:2245-2250 (1999); Zhu et al., J. Immunol. Methods 231:207-222 (1999); and references cited therein.

[0261] Polynucleotides Encoding Antibodies

[0262] The invention further provides polynucleotides comprising a nucleotide sequence encoding an antibody of the invention and fragments thereof. The invention also encompasses polynucleotides that hybridize under stringent or alternatively, under lower stringency hybridization conditions, e.g., as defined supra, to polynucleotides that encode an antibody, preferably, that specifically binds to a polypeptide of the invention, preferably, an antibody that binds to a polypeptide having the amino acid sequence of SEQ ID NO: Y, to a polypeptide encoded by a portion of SEQ ID NO: X as defined in columns 8 and 9 of Table 2, and/or to a polypeptide encoded by the cDNA contained in Clone ID NO: Z.

[0263] The polynucleotides may be obtained, and the nucleotide sequence of the polynucleotides determined, by any method known in the art. For example, if the nucleotide sequence of the antibody is known, a polynucleotide encoding the antibody may be assembled from chemically synthesized oligonucleotides (e.g., as described in Kutmeler et al., BioTechniques 17:242 (1994)), which, briefly, involves the synthesis of overlapping oligonucleotides containing portions of the sequence encoding the antibody, annealing and ligating of those oligonucleotides, and then amplification of the ligated oligonucleotides by PCR.

[0264] Alternatively, a polynucleotide encoding an antibody may be generated from nucleic acid from a suitable source. If a clone containing a nucleic acid encoding a particular antibody is not available, but the sequence of the antibody molecule is known, a nucleic acid encoding the immunoglobulin may be chemically synthesized or obtained from a suitable source (e.g., an antibody cDNA library, or a cDNA library generated from, or nucleic acid, preferably poly A+ RNA, isolated from, any tissue or cells expressing the antibody, such as hybridoma cells selected to express an antibody of the invention) by PCR amplification using synthetic primers hybridizable to the 3′ and 5′ ends of the sequence or by cloning using an oligonucleotide probe specific for the particular gene sequence to identify, e.g., a cDNA clone from a cDNA library that encodes the antibody. Amplified nucleic acids generated by PCR may then be cloned into replicable cloning vectors using any method well known in the art.

[0265] Once the nucleotide sequence and corresponding amino acid sequence of the antibody is determined, the nucleotide sequence of the antibody may be manipulated using methods well known in the art for the manipulation of nucleotide sequences, e.g., recombinant DNA techniques, site directed mutagenesis, PCR, etc. (see, for example, the techniques described in Sambrook et al., 1990, Molecular Cloning, A Laboratory Manual, 2d Ed., Cold Spring Harbor Laboratory, Cold Spring Harbor, N.Y. and Ausubel et al., eds., 1998, Current Protocols in Molecular Biology, John Wiley & Sons, NY, which are both incorporated by reference herein in their entireties ), to generate antibodies having a different amino acid sequence, for example to create amino acid substitutions, deletions, and/or insertions.

[0266] In a specific embodiment, the amino acid sequence of the heavy and/or light chain variable domains may be inspected to identify the sequences of the complementarity determining regions (CDRs) by methods that are well know in the art, e.g., by comparison to known amino acid sequences of other heavy and light chain variable regions to determine the regions of sequence hypervariability. Using routine recombinant DNA techniques, one or more of the CDRs may be inserted within framework regions, e.g., into human framework regions to humanize a non-human antibody, as described stipra. The framework regions may be naturally occurring or consensus framework regions, and preferably human framework regions (see, e.g., Chothia et al., J. Mol. Biol. 278: 457-479 (1998) for a listing of human framework regions). Preferably, the polynucleotide generated by the combination of the framework regions and CDRs encodes an antibody that specifically binds a polypeptide of the invention. Preferably, as discussed supra, one or more amino acid substitutions may be made within the framework regions, and, preferably, the amino acid substitutions improve binding of the antibody to its antigen. Additionally, such methods may be used to make amino acid substitutions or deletions of one or more variable region cysteine residues participating in an intrachain disulfide bond to generate antibody-molecules lacking one or more intrachain disulfide bonds. Other alterations to the polynucleotide are encompassed by the present invention and within the skill of the art.

[0267] In addition, techniques developed for the production of “chimeric antibodies” (Morrison et al., Proc. Natl. Acad. Sci. 81:851-855 (1984); Neuberger et al., Nature 312:604-608 (1984); Takeda et al., Nature 314:452-454 (1985)) by splicing genes from a mouse antibody molecule of appropriate antigen specificity together with genes from a human antibody molecule of appropriate biological activity can be used. As described supra, a chimeric antibody is a molecule in which different portions are derived from different animal species, such as those having a variable region derived from a murine mAb and a human immunoglobulin constant region, e.g., humanized antibodies.

[0268] Alternatively, techniques described for the production of single chain antibodies (U.S. Pat. No. 4,946,778; Bird, Science 242:423-42 (1988); Huston et al., Proc. Natl. Acad. Sci. USA 85:5879-5883 (1988); and Ward et al., Nature 334:544-54 (1989)) can be adapted to produce single chain antibodies. Single chain antibodies are formed by linking the heavy and light chain fragments of the Fv region via an amino acid bridge, resulting in a single chain polypeptide. Techniques for the assembly of functional Fv fragments in E. coli may also be used (Skerra et al., Science 242:1038-1041 (1988)).

[0269] Methods of Producing Antibodies

[0270] The antibodies of the invention can be produced by any method known in the art for the synthesis of antibodies, in particular, by chemical synthesis or preferably, by recombinant expression techniques. Methods of producing antibodies include, but are not limited to, hybridoma technology, EBV transformation, and other methods discussed herein as well as through the use recombinant DNA technology, as discussed below.

[0271] Recombinant expression of an antibody of the invention, or fragment, derivative or analog thereof, (e.g., a heavy or light chain of an antibody of the invention or a single chain antibody of the invention), requires construction of an expression vector containing a polynucleotide that encodes the antibody. Once a polynucleotide encoding an antibody molecule or a heavy or light chain of an antibody, or portion thereof (preferably containing the heavy or light chain variable domain), of the invention has been obtained, the vector for the production of the antibody molecule may be produced by recombinant DNA technology using techniques well known in the art. Thus, methods for preparing a protein by expressing a polynucleotide containing an antibody encoding nucleotide sequence are described herein. Methods which are well known to those skilled in the art can be used to construct expression vectors containing antibody coding sequences and appropriate transcriptional and translational control signals. These methods include, for example, in vitro recombinant DNA techniques, synthetic techniques, and in vivo genetic recombination. The invention, thus, provides replicable vectors comprising a nucleotide sequence encoding an antibody molecule of the invention, or a heavy or light chain thereof, or a heavy or light chain variable domain, operably linked to a promoter. Such vectors may include the nucleotide sequence encoding the constant region of the antibody molecule (see, e.g., PCT Publication WO 86/05807; PCT Publication WO 89/01036; and U.S. Pat. No. 5,122,464) and the variable domain of the antibody may be cloned into such a vector for expression of the entire heavy or light chain.

[0272] The expression vector is transferred to a host cell by conventional techniques and the transfected cells are then cultured by conventional techniques to produce an antibody of the invention. Thus, the invention includes host cells containing a polynucleotide encoding an antibody of the invention, or a heavy or light chain thereof, or a single chain antibody of the invention, operably linked to a heterologous promoter. In preferred embodiments for the expression of double-chained antibodies, vectors encoding both the heavy and light chains may be co-expressed in the host cell for expression of the entire immunoglobulin molecule, as detailed below.

[0273] A variety of host-expression vector systems may be utilized to express the antibody molecules of the invention. Such host-expression systems represent vehicles by which the coding sequences of interest may be produced and subsequently purified, but also represent cells which may, when transformed or transfected with the appropriate nucleotide coding sequences, express an antibody molecule of the invention in situ. These include but are not limited to microorganisms such as bacteria (e.g., E. coli, B. subtilis) transformed with recombinant bacteriophage DNA, plasmid DNA or cosmid DNA expression vectors containing antibody coding sequences; yeast (e.g., Saccharomyces, Pichia) transformed with recombinant yeast expression vectors containing antibody coding sequences; insect cell systems infected with recombinant virus expression vectors (e.g., baculovirus) containing antibody coding sequences; plant cell systems infected with recombinant virus expression vectors (e.g., cauliflower mosaic virus, CaMV; tobacco mosaic virus, TMV) or transformed with recombinant plasmid expression vectors (e.g., Ti plasmid) containing antibody coding sequences; or mammalian cell systems (e.g., COS, CHO, BHK, 293, 3T3 cells) harboring recombinant expression constructs containing promoters derived from the genome of mammalian cells (e.g., metallothionein promoter) or from mammalian viruses (e.g., the adenovirus late promoter; the vaccinia virus 7.5K promoter). Preferably, bacterial cells such as Escherichia coli, and more preferably, eukaryotic cells, especially for the expression of whole recombinant antibody molecule, are used for the expression of a recombinant antibody molecule. For example, mammalian cells such as Chinese hamster ovary cells (CHO), in conjunction with a vector such as the major intermediate early gene promoter element from human cytomegalovirus is an effective expression system for antibodies (Foecking et al., Gene 45:101 (1986); Cockett et al., Bio/Technology 8:2 (1990)).

[0274] In bacterial systems, a number of expression vectors may be advantageously selected depending upon the use intended for the antibody molecule being expressed. For example, when a large quantity of such a protein is to be produced, for the generation of pharmaceutical compositions of an antibody molecule, vectors which direct the expression of high levels of fusion protein products that are readily purified may be desirable. Such vectors include, but are not limited, to the E. coli expression vector pUR278 (Ruther et al., EMBO J. 2:1791 (1983)), in which the antibody coding sequence may be ligated individually into the vector in frame with the lac Z coding region so that a fusion protein is produced; pIN vectors (Inouye & Inouye, Nucleic Acids Res. 13:3101-3109 (1985); Van Heeke & Schuster, J. Biol. Chem. 24:5503-5509 (1989)); and the like. pGEX vectors may also be used to express foreign polypeptides as fusion proteins with glutathione S-transferase (GST). In general, such fusion proteins are soluble and can easily be purified from lysed cells by adsorption and binding to matrix glutathione-agarose beads followed by elution in the presence of free glutathione. The pGEX vectors are designed to include thrombin or factor Xa protease cleavage sites so that the cloned target gene product can be released from the GST moiety.

[0275] In an insect system, Autographa californica nuclear polyhedrosis virus (AcNPV) is used as a vector to express foreign genes. The virus grows in Spodoptera frugiperda cells. The antibody coding sequence may be cloned individually into non-essential regions (for example the polyhedrin gene) of the virus and placed under control of an AcNPV promoter (for example the polyhedrin promoter).

[0276] In mammalian host cells, a number of viral-based expression systems may be utilized. In cases where an adenovirus is used as an expression vector, the antibody coding sequence of interest may be ligated to an adenovirus transcriptionltranslation control complex, e.g., the late promoter and tripartite leader sequence. This chimeric gene may then be inserted in the adenovirus genome by in vitro or in vivo recombination. Insertion in a non- essential region of the viral genome (e.g., region E1 or E3) will result in a recombinant virus that is viable and capable of expressing the antibody molecule in infected hosts. (e.g., see Logan & Shenk, Proc. Natl. Acad. Sci. USA 81:355-359 (1984)). Specific initiation signals may also be required for efficient translation of inserted antibody coding sequences. These signals include the ATG initiation codon and adjacent sequences. Furthermore, the initiation codon must be in phase with the reading frame of the desired coding sequence to ensure translation of the entire insert. These exogenous translational control signals and initiation codons can be of a variety of origins, both natural and synthetic. The efficiency of expression may be enhanced by the inclusion of appropriate transcription enhancer elements, transcription terminators, etc. (see Bittner et al., Methods in Enzymol. 153:51-544 (1987)).

[0277] In addition, a host cell strain may be chosen which modulates the expression of the inserted sequences, or modifies and processes the gene product in the specific fashion desired. Such modifications (e.g., glycosylation) and processing (e.g., cleavaoe) of protein products may be important for the function of the protein. Different host cells have characteristic and specific mechanisms for the post-translational processing and modification of proteins and gene products. Appropriate cell lines or host systems can be chosen to ensure the correct modification and processing of the foreign protein expressed. To this end, eukaryotic host cells which possess the cellular machinery for proper processing of the primary transcript, glycosylation, and phosphorylation of the gene product may be used. Such mammalian host cells include but are not limited to CHO, VERY, BH-K, Hela, COS, MDCK, 293, 3T3, WI38, and in particular, breast cancer cell lines such as, for example, BT483, Hs578T, HTB2, BT20 and T47D, and normal mammary gland cell line such as, for example, CRL7030 and Hs578Bst.

[0278] For long-term, high-yield production of recombinant proteins, stable expression is preferred. For example, cell lines, which stably express the antibody molecule may be engineered. Rather than using expression vectors which contain viral origins of replication, host cells can be transformed with DNA controlled by appropriate expression control elements (e.g., promoter, enhancer, sequences, transcription terminators, polyadenylation sites, etc.), and a selectable marker. Following the introduction of the foreign DNA, engineered cells may be allowed to grow for 1-2 days in an enriched media, and then are switched to a selective media. The selectable marker in the recombinant plasmid confers resistance to the selection and allows cells to stably integrate the plasmid into their chromosomes and grow to form foci which in turn can be cloned and expanded into cell lines. This method may advantageously be used to engineer cell lines, which express the antibody molecule. Such engineered cell lines may be particularly useful in screening and evaluation of compounds that interact directly or indirectly with the antibody molecule.

[0279] A number of selection systems may be used, including but not limited to the herpes simplex virus thymidine kinase (Wigler et al., Cell 11:223 (1977)), hypoxanthine-guanine phosphoribosyltransferase (Szybalska & Szybalski, Proc. Natl. Acad. Sci. USA 48:202 (1992)), and adenine phosphoribosyltransferase (Lowy et al., Cell 22:817 (1980)) genes can be employed in tk-, hgprt- or aprt- cells, respectively. Also, antimetabolite resistance can be used as the basis of selection for the following genes: dhfr, which confers resistance to methotrexate (Wigler et al., Natl. Acad. Sci. USA 77:357 (1980); O'Hare et al., Proc. Natl. Acad. Sci. USA 78:1527 (1981)); gpt, which confers resistance to mycophenolic acid (Mulligan & Berg, Proc. Natl. Acad. Sci. USA 78:2072 (1981)); neo, which confers resistance to the aminoglycoside G-418 Clinical Pharmacy 12:488-505; Wu and Wu, Biotherapy 3:87-95 (1991); Tolstoshev, Ann. Rev. Pharmacol. Toxicol. 32:573-596 (1993); Mulligan, Science 260:926-932 (1993); and Morgan and Anderson, Ann. Rev. Biochem. 62:191-217 (1993); TIB TECH 11(5):155-215 (1993)); and hygro, which confers resistance to hygromycin (Santerre et al., Gene 30:147 (1984)). Methods commonly known in the art of recombinant DNA technology may be routinely applied to select the desired recombinant clone, and such methods are described, for example, in Ausubel et al. (eds.), Current Protocols in Molecular Biology, John Wiley & Sons, NY (1993); Kriegler, Gene Transfer and Expression, A Laboratory Manual, Stockton Press, NY (1990); and in Chapters 12 and 13, Dracopoli et al. (eds), Current Protocols in Human Genetics, John Wiley & Sons, NY (1994); Colberre-Garapin et al., J. Mol. Biol. 150:1 (1981), which are incorporated by reference herein in their entireties.

[0280] The expression levels of an antibody molecule can be increased by vector amplification (for a review, see Bebbington and Hentschel, The use of vectors based on gene amplification for the expression of cloned genes in mammalian cells in DNA cloning, Vol.3. (Academic Press, New York, 1987)). When a marker in the vector system expressing antibody is amplifiable, increase in the level of inhibitor present in culture of host cell will increase the number of copies of the marker gene. Since the amplified region is associated with the antibody gene, production of the antibody will also increase (Crouse et al., Mol. Cell. Biol. 3:257 (1983)).

[0281] Vectors which use glutamine synthase (GS) or DHFR as the selectable markers can be amplified in the presence of the drugs methionine sulphoximine or methotrexate, respectively. An advantage of glutamine synthase based vectors are the availabilty of cell lines (e.g., the murine myeloma cell line, NS0) which are glutamine synthase negative. Glutamine synthase expression systems can also function in glutamine synthase expressing cells (e.g., Chinese Hamster Ovary (CHO) cells) by providing additional inhibitor to prevent the functioning of the endogenous gene. A glutamine synthase expression system and components thereof are detailed in PCT publications: WO87/04462; WO86/05807; WO89/011036; WO89/10404; and WO91/06657, which are incorporated in their entireties by reference herein. Additionally, glutamine synthase expression vectors that may be used according to the present invention are commercially available from suplliers, including, for example Lonza Biologics, Inc. (Portsmouth, N.H.). Expression and production of monoclonal antibodies using a GS expression system in murine myeloma cells is described in Bebbington et al., Bio/technology 10:169(1992) and in Biblia and Robinson Biotechnol. Prog. 11:1 (1995) which are incorporated in their entirities by reference herein.

[0282] The host cell may be co-transfected with two expression vectors of the invention, the first vector encoding a heavy chain derived polypeptide and the second vector encoding a light chain derived polypeptide. The two vectors may contain identical selectable markers, which enable equal expression of heavy and light chain polypeptides. Alternatively, a single vector may be used which encodes, and is capable of expressing, both heavy and light chain polypeptides. In such situations, the light chain should be placed before the heavy chain to avoid an excess of toxic free heavy chain (Proudfoot, Nature 322:52 (1986); Kohler, Proc. Natl. Acad. Sci. USA 77:2197 (1980)). The coding sequences for the heavy and light chains may comprise cDNA or genomic DNA.

[0283] Once an antibody molecule of the invention has been produced by an animal, chemically synthesized, or recombinantly expressed, it may be purified by any method known in the art for purification of an immunoglobulin molecule, for example, by chromatography (e.g., ion exchange, affinity, particularly by affinity for the specific antigen after Protein A, and sizing column chromatography), centrifugation, differential solubility, or by any other standard technique for the purification of proteins. In addition, the antibodies of the present invention or fragments thereof can be fused to heterologous polypeptide sequences described herein or otherwise known in the art, to facilitate purification.

[0284] The present invention encompasses antibodies recombinantly fused or chemically conjugated (including both covalently and non-covalently conjugations) to a polypeptide (or portion thereof, preferably at least 10, 20, 30, 40, 50, 60, 70, 80, 90 or 100 amino acids of the polypeptide) of the present invention to generate fusion proteins. The fusion does not necessarily need to be direct, but may occur through linker sequences. The antibodies may be specific for antigens other than polypeptides (or portion thereof, preferably at least 10, 20, 30, 40, 50, 60, 70, 80, 90 or 100 amino acids of the polypeptide) of the present invention. For example, antibodies may be used to target the polypeptides of the present invention to particular cell types, either in vitro or in vivo, by fusing or conjugating the polypeptides of the present invention to antibodies specific for particular cell surface receptors. Antibodies fused or conjugated to the polypeptides of the present invention may also be used in in vitro immunoassays and purification methods using methods known in the art. See e.g., Harbor et al., supra, and PCT publication WO 93/21232; EP 439,095; Naramura et al., Immunol. Lett. 39:91-99 (1994); U.S. Pat. No. 5,474,981; Gillies et al., PNAS 89:1428-1432 (1992); Fell et al., J. Immunol. 146:2446-2452 (1991), which are incorporated by reference in their entireties.

[0285] The present invention further includes compositions comprising the polypeptides of the present invention fused or conjugated to antibody domains other than the variable regions. For example, the polypeptides of the present invention may be fused or conjugated to an antibody Fc region, or portion thereof. The antibody portion fused to a polypeptide of the present invention may comprise the constant region, hinge region, CH1 domain, CH2 domain, and CH3 domain or any combination of whole domains or portions thereof. The polypeptides may also be fused or conjugated to the above antibody portions to form multimers. For example, Fc portions fused to the polypeptides of the present invention can form dimers through disulfide bonding between the Fc portions. Higher multimeric forms can be made by fusing the polypeptides to portions of IgA and IgM. Methods for fusing or conjugating the polypeptides of the present invention to antibody portions are known in the art. See, e.g., U.S. Pat. Nos. 5,336,603; 5,622,929; 5,359,046; 5,349,053; 5,447,851; 5,112,946; EP 307,434; EP 367,166; PCT publications WO 96/04388; WO 91/06570; Ashkenazi et al., Proc. Natl. Acad. Sci. USA 88:10535-10539 (1991); Zheng et al., J. Immunol. 154:5590-5600 (1995); and Vil et al., Proc. Natl. Acad. Sci. USA 89:11337-11341 (1992) (said references incorporated by reference in their entireties).

[0286] As discussed, supra, the polypeptides corresponding to a polypeptide, polypeptide fragment, or a variant of SEQ ID NO: Y may be fused or conjugated to the above antibody portions to increase the in vivo half life of the polypeptides or for use in immunoassays using methods known in the art. Further, the polypeptides corresponding to SEQ ID NO: Y may be fused or conjugated to the above antibody portions to facilitate purification. One reported example describes chimeric proteins consisting of the first two domains of the human CD4-polypeptide and various domains of the constant regions of the heavy or light chains of mammalian immunoglobulins. See EP 394,827; Traunecker et al., Nature 331:84-86 (1988). The polypeptides of the present invention fused or conjugated to an antibody having disulfide-linked dimeric structures (due to the IgG) may also be more efficient in binding and neutralizing other molecules, than the monomeric secreted protein or protein fragment alone. See, for example, Fountoulakis et al., J. Biochem. 270:3958-3964 (1995). In many cases, the Fc part in a fusion protein is beneficial in therapy and diagnosis, and thus can result in, for example, improved pharmacokinetic properties. See, for example, EP A 232,262. Alternatively, deleting the Fc part after the fusion protein has been expressed, detected, and purified, would be desired. For example, the Fc portion may hinder therapy and diagnosis if the fusion protein is used as an antigen for immunizations. In drug discovery, for example, human proteins, such as hIL-5, have been fused with Fc portions for the purpose of high-throughput screening assays to identify antagonists of hIL-5. (See, Bennett et al., J. Molecular Recognition 8:52-58 (1995); Johanson et al., J. Biol. Chem. 270:9459-9471 (1995)).

[0287] Moreover, the antibodies or fragments thereof of the present invention can be fused to marker sequences, such as a peptide to facilitate purification. In preferred embodiments, the marker amino acid sequence is a hexa-histidine peptide, such as the tag provided in a pQE vector (QIAGEN, Inc., 9259 Eton Avenue, Chatsworth, Calif., 91311), among others, many of which are commercially available. As described in Gentz et al., Proc. Natl. Acad. Sci. USA 86:821-824 (1989), for instance, hexa-histidine provides for convenient purification of the fusion protein. Other peptide tags useful for purification include, but are not limited to, the “HA” tag, which corresponds to an epitope derived from the influenza hemagglutinin protein (Wilson et al., Cell 37:767 (1984)) and the “flag” tag.

[0288] The present invention further encompasses antibodies or fragments thereof conjugated to a diagnostic or therapeutic agent. The antibodies can be used diagnostically to, for example, monitor the development or progression of a tumor as part of a clinical testing procedure to, e.g., determine the efficacy of a given treatment regimen. Detection can be facilitated by coupling the antibody to a detectable substance. Examples of detectable substances include various enzymes, prosthetic groups, fluorescent materials, luminescent materials, bioluminescent materials, radioactive materials, positron emitting metals using various positron emission tomographies, and nonradioactive paramagnetic metal ions. The detectable substance may be coupled or conjugated either directly to the antibody (or fragment thereof) or indirectly, through an intermediate (such as, for example, a linker known in the art) using techniques known in the art. See, for example, U.S. Pat. No. 4,741,900 for metal ions, which can be conjugated to antibodies for use as diagnostics according to the present invention.

[0289] Further, an antibody or fragment thereof may be conjugated to a therapeutic moiety such as a cytotoxin, e.g., a cytostatic or cytocidal agent, a therapeutic agent or a radioactive metal ion, e.g., alpha-emitters such as, for example, 213Bi. A cytotoxin or cytotoxic agent includes any agent that is detrimental to cells. Examples include paclitaxol, cytochalasin B, gramicidin D, ethidium bromide, emetine, mitomycin, etoposide, tenoposide, vincristine, vinblastine, coichicin, doxorubicin, daunorubicin, dihydroxy anthracin dione, mitoxantrone, mithramycin, actinomycin D, 1-dehydrotestosterone, glucocorticoids, procaine, tetracaine, lidocaine, propranolol, and puromycin and analogs or homologs thereof. Therapeutic agents include, but are not limited to, antimetabolites (e.g., methotrexate, 6-mercaptopurine, 6-thioguanine, cytarabine, 5-fluorouracil decarbazine), alkylating agents (e.g., mechlorethamine, thioepa chlorambucil, melphalan, carmustine (BSNU) and lomustine (CCNU), cyclothosphamide, busulfan, dibromomannitol, streptozotocin, mitomycin C, and cis-dichlorodiamine platinum (II) (DDP) cisplatin), anthracyclines (e.g., daunorubicin (formerly daunomycin) and doxorubicin), antibiotics (e.g., dactinomycin (formerly actinomycin), bleomycin, mithramycin, and anthramycin (AMC)), and anti-mitotic agents (e.g., vincristine and vinblastine).

[0290] The conjugates of the invention can be used for modifying a given biological response, the therapeutic agent or drug moiety is not to be construed as limited to classical chemical therapeutic agents. For example, the drug moiety may be a protein or polypeptide possessing a desired biological activity. Such proteins may include, for example, a toxin such as abrin, ricin A, pseudomonas exotoxin, or diphtheria toxin; a protein such as tumor necrosis factor, α-interferon, β-interferon, nerve growth factor, platelet derived growth factor, tissue plasminogen activator, an apoptotic agent, e.g., TNF-alpha, TNF-beta, AIM I (See, International Publication No. WO 97/33899), AIM II (See, International Publication No. WO 97/34911), Fas Ligand (Takahashi et al., Int. Immunol., 6:1567-1574 (1994)), VEGI (See, International Publication No. WO 99/23105), a thrombotic agent or an anti-angiogenic agent, e.g., angiostatin or endostatin; or, biological response modifiers such as, for example, lymphokines, interleukin-1 (“IL-1”), interleukin-2 (“IL-2”), interleukin-6 (“IL-6”), granulocyte macrophage colony stimulating factor (“GM-CSF”), granulocyte colony stimulating factor (“G-CSF”), or other growth factors.

[0291] Antibodies may also be attached to solid supports, which are particularly useful for immunoassays or purification of the target antigen. Such solid supports include, but are not limited to, glass, cellulose, polyacrylamide, nylon, polystyrene, polyvinyl chloride or polypropylene.

[0292] Techniques for conjugating such therapeutic moiety to antibodies are well known. See, for example, Arnon et al., “Monoclonal Antibodies For Immunotargeting Of Drugs In Cancer Therapy”, in Monoclonal Antibodies And Cancer Therapy, Reisfeld et al. (eds.), pp. 243-56 (Alan R. Liss, Inc. 1985); Hellstrom et al., “Antibodies For Drug Delivery”, in Controlled Drug Delivery (2nd Ed.), Robinson et al. (eds.), pp. 623-53 (Marcel Dekker, Inc. 1987); Thorpe, “Antibody Carriers Of Cytotoxic Agents In Cancer Therapy: A Review”, in Monoclonal Antibodies '84: Biological And Clinical Applications, Pinchera et al. (eds.), pp. 475-506 (1985); “Analysis, Results, And Future Prospective Of The Therapeutic Use Of Radiolabeled Antibody In Cancer Therapy”, in Monoclonal Antibodies For Cancer Detection And Therapy, Baldwin et al. (eds.), pp. 303-16 (Academic Press 1985), and Thorpe et al., “The Preparation And Cytotoxic Properties Of Antibody-Toxin Conjugates”, Immunol. Rev. 62:119-58 (1982).

[0293] Alternatively, an antibody can be conjugated to a second antibody to form an antibody heteroconjugate as described by Segal in U.S. Pat. No. 4,676,980, which is incorporated herein by reference in its entirety.

[0294] An antibody, with or without a therapeutic moiety conjugated to it, administered alone or in combination with cytotoxic factor(s) and/or cytokine(s) can be used as a therapeutic.

[0295] Immunophenotyping

[0296] The antibodies of the invention may be utilized for immunophenotyping of cell lines and biological samples. Translation products of the genes of the present invention may be useful as cell specific markers, or more specifically as cellular markers that are differentially expressed at various stages of differentiation and/or maturation of particular cell types. Monoclonal antibodies directed against a specific epitope, or combination of epitopes, will allow for the screening of cellular populations expressing the marker. Various techniques can be utilized using monoclonal antibodies to screen for cellular populations expressing the marker(s), and include magnetic separation using antibody-coated magnetic beads, “panning” with antibody attached to a solid matrix (i.e., plate), and flow cytometry (See, e.g., U.S. Pat. No. 5,985,660; and Morrison et al., Cell, 96:737-49 (1999)).

[0297] These techniques allow for the screening of particular populations of cells, such as might be found with hematological malignancies (i.e. minimal residual disease (MRD) in acute leukemic patients) and “non-self” cells in transplantations to prevent Graft-versus-Host Disease (GVHD). Alternatively, these techniques allow for the screening of hematopoietic stem and progenitor cells capable of undergoing proliferation and/or differentiation, as might be found in human umbilical cord blood.

[0298] Assays For Antibody Binding

[0299] The antibodies of the invention may be assayed for immunospecific binding by any method known in the art. The immunoassays, which can be used include, but are not limited to, competitive and non-competitive assay systems using techniques such as western blots, radioimmunoassays, ELISA (enzyme linked immunosorbent assay), “sandwich” immunoassays, immunoprecipitation assays, precipitin reactions, gel diffusion precipitin reactions, immunodiffusion assays, agglutination assays, complement-fixation assays, immunoradiometric assays, fluorescent immunoassays, and protein A immunoassays, to name but a few. Such assays are routine and well known in the art (see, e.g., Ausubel et al, eds, 1994, Current Protocols in Molecular Biology, Vol. 1, John Wiley & Sons, Inc., New York, which is incorporated by reference herein in its entirety). Exemplary immunoassays are described briefly below (but are not intended by way of limitation).

[0300] Immunoprecipitation protocols generally comprise lysing a population of cells in a lysis buffer such as RIPA buffer (1% NP-40 or Triton X-100, 1% sodium deoxycholate, 0.1% SDS, 0.15 M NaCl, 0.01 M sodium phosphate at pH 7.2, 1% Trasylol) supplemented with protein phosphatase and/or protease inhibitors (e.g., EDTA, PMSF, aprotinin, sodium vanadate), adding the antibody of interest to the cell lysate, incubating for a period of time (e.g., 1-4 hours) at 4° C., adding protein A and/or protein G sepharose beads to the cell lysate, incubating for about an hour or more at 4° C., washing the beads in lysis buffer and resuspending the beads in SDS/sample buffer. The ability of the antibody of interest to immunoprecipitate a particular antigen can be assessed by, e.g., western blot analysis. One of skill in the art would be knowledgeable as to the parameters that can be modified to increase the binding of the antibody to an antigen and decrease the background (e.g., pre-clearing the cell lysate with sepharose beads). For further discussion regarding immunoprecipitation protocols see, e.g., Ausubel et al., eds., (1994), Current Protocols in Molecular Biology, Vol. 1, John Wiley & Sons, Inc., New York, section 10.16.1.

[0301] Western blot analysis generally comprises preparing protein samples, electrophoresis of the protein samples in a polyacrylamide gel (e.g., 8%-20% SDS-PAGE depending on the molecular weight of the antigen), transferring the protein sample from the polyacrylamide gel to a membrane such as nitrocellulose, PVDF or nylon, blocking the membrane in blocking solution (e.g., PBS with 3% BSA or non-fat milk), washing the membrane in washing buffer (e.g., PBS-Tween 20), blocking the membrane with primary antibody (the antibody of interest) diluted in blocking buffer, washing the membrane in washing buffer, blocking the membrane with a secondary antibody (which recognizes the primary antibody, e.g., an anti-human antibody) conjugated to an enzymatic substrate (e.g., horseradish peroxidase or alkaline phosphatase) or radioactive molecule (e.g., 32P or 125I) diluted in blocking buffer, washing the membrane in wash buffer, and detecting the presence of the antigen. One of skill in the art would be knowledgeable as to the parameters that can be modified to increase the signal detected and to reduce the background noise. For further discussion regarding western blot protocols see, e.g., Ausubel et al., eds., (1994), Current Protocols in Molecular Biology, Vol. 1, John Wiley & Sons, Inc., New York, section 10.8.1.

[0302] ELISAs comprise preparing antigen, coating the well of a 96 well microtiter plate with the antigen, adding the antibody of interest conjugated to a detectable compound such as an enzymatic substrate (e.g., horseradish peroxidase or alkaline phosphatase) to the well and incubating for a period of time, and detecting the presence of the antigen. In ELISAs the antibody of interest does not have to be conjugated to a detectable compound; instead, a second antibody (which recognizes the antibody of interest) conjugated to a detectable compound may be added to the well. Further, instead of coating the well with the antigen, the antibody may be coated to the well. In this case, a second antibody conjugated to a detectable compound may be added following the addition of the antigen of interest to the coated well. One of skill in the art would be knowledgeable as to the parameters that can be modified to increase the signal detected as well as other variations of ELISAs known in the art. For further discussion regarding ELISAs see, e.g., Ausubel et al., eds., (1994), Current Protocols in Molecular Biology, Vol. 1, John Wiley & Sons, Inc., New York, section 11.2.1.

[0303] The binding affinity of an antibody to an antigen and the off-rate of an antibody-antigen interaction can be determined by competitive binding assays. One example of a competitive binding assay is a radioimmunoassay comprising the incubation of labeled antigen (e.g., 3H or 125I) with the antibody of interest in the presence of increasing amounts of unlabeled antigen, and the detection of the antibody bound to the labeled antigen. The affinity of the antibody of interest for a particular antigen and the binding off-rates can be determined from the data by scatchard plot analysis. Competition with a second antibody can also be determined using radioimmunoassays. In this case, the antigen is incubated with antibody of interest conjugated to a labeled compound (e.g., 3H or 125I) in the presence of increasing amounts of an unlabeled second antibody.

[0304] Antibodies of the invention may be characterized using immunocytochemisty methods on cells (e.g., mammalian cells, such as CHO cells) transfected with a vector enabling the expression of a excretory system antigen or with vector alone using techniques commonly known in the art. Antibodies that bind excretory system antigen transfected cells, but not vector-only transfected cells, are excretory system antigen specific.

[0305] Therapeuitic Uses

[0306] The present invention is further directed to antibody-based therapies which involve administering antibodies of the invention to an animal, preferably a mammal, and most preferably a human, patient for treating one or more of the disclosed diseases, disorders, or conditions. Therapeutic compounds of the invention include, but are not limited to, antibodies of the invention (including fragments, analogs and derivatives thereof as described herein) and nucleic acids encoding antibodies of the invention (including fragments, analogs and derivatives thereof and anti-idiotypic antibodies as described herein). The antibodies of the invention can be used to treat, inhibit or prevent diseases, disorders or conditions associated with aberrant expression and/or activity of a polypeptide of the invention, including, but not limited to, any one or more of the diseases, disorders, or conditions described herein. The treatment and/or prevention of diseases, disorders, or conditions associated with aberrant expression and/or activity of a polypeptide of the invention includes, but is not limited to, alleviating symptoms associated with those diseases, disorders or conditions. Antibodies of the invention may be provided in pharmaceutically acceptable compositions as known in the art or as described herein.

[0307] In a specific and preferred embodiment, the present invention is directed to antibody-based therapies which involve administering antibodies of the invention to an animal, preferably a mammal, and most preferably a human, patient for treating one or more of the diseases, disorders, or conditions of the excretory system, including, but not limited to, renal disorders (e.g., kidney failure, nephritis, blood vessel disorders of kidney, metabolic and congenital kidney disorders, urinary disorders of the kidney, autoimmune disorders, sclerosis and necrosis, and electrolyte imbalance, and kidney cancer), bladder disorders (e.g, urinary tract infection, bladder obstruction, urination disorders, and bladder cancer), urether disorders (e.g., obstruction of the ureter and ureter cancer), urethra disorders (e.g., obstruction of the urethra and urethra cancers) and/or those disorders as discribed under “Urinary System Disorders” below. Therapeutic compounds of the invention include, but are not limited to, antibodies of the invention (e.g., antibodies directed to the full length protein expressed on the cell surface of a mammalian cell; antibodies directed to an epitope of an excretory system associated polypeptide of the invention (such as, a linear epitope (shown in Table 1A, column 6) or a conformational epitope), including fragments, analogs and derivatives thereof as described herein) and nucleic acids encoding antibodies of the invention (including fragments, analogs and derivatives thereof and anti-idiotypic antibodies as described herein). The antibodies of the invention can be used to treat, inhibit or prevent diseases, disorders or conditions associated with aberrant expression and/or activity of a polypeptide of the invention, including, but not limited to, any one or more of the diseases, disorders, or conditions of the excretory system described herein. The treatment and/or prevention of diseases, disorders, or conditions of the excretory system associated with aberrant expression and/or activity of a polypeptide of the invention includes, but is not limited to, alleviating symptoms associated with those diseases, disorders or conditions. Antibodies of the invention may be provided in pharmaceutically acceptable compositions as known in the art or as described herein.

[0308] A summary of the ways in which the antibodies of the present invention may be used therapeutically includes binding polynucleotides or polypeptides of the present invention locally or systemically in the body or by direct cytotoxicity of the antibody, e.g. as mediated by complement (CDC) or by effector cells (ADCC). Some of these approaches are described in more detail below. Armed with the teachings provided herein, one of ordinary skill in the art will know how to use the antibodies of the present invention for diagnostic, monitoring or therapeutic purposes without undue experimentation.

[0309] The antibodies of this invention may be advantageously utilized in combination with other monoclonal or chimeric antibodies, or with lymphokines or hematopoietic growth factors (such as, e.g., IL-2, IL-3 and IL-7), for example, which serve to increase the number or activity of effector cells, which interact with the antibodies.

[0310] The antibodies of the invention may be administered alone or in combination with other types of treatments (e.g., radiation therapy, chemotherapy, hormonal therapy, immunotherapy and anti-tumor agents). Generally, administration of products of a species origin or species reactivity (in the case of antibodies) that is the same species as that of the patient is preferred. Thus, in a preferred embodiment, human antibodies, fragments derivatives, analogs, or nucleic acids, are administered to a human patient for therapy or prophylaxis.

[0311] It is preferred to use high affinity and/or potent in vivo inhibiting and/or neutralizing antibodies against polypeptides or polynucleotides of the present invention, fragments or regions thereof, for both immunoassays directed to and therapy of disorders related to polynucleotides or polypeptides, including fragments thereof, of the present invention. Such antibodies, fragments, or regions, will preferably have an affinity for polynucleotides or polypeptides of the invention, including fragments thereof. Preferred binding affinities include those with a dissociation constant or Kd less than 5×10⁻² M, 10⁻² M, 5×10⁻³ M, 10⁻³ M, 5×10⁻⁴M, 10⁻⁴ M, 5×10⁻⁵ M, 10⁻⁵ M, 5×10⁻⁶ M, 10⁻⁶ M, 5×10⁻⁷ M, 10⁻⁷ M, 5×10⁻⁸ M, 10⁻⁸ M, 5×10⁻⁹ M, 10⁻⁹ M, 5×10⁻¹⁰ M, 10⁻¹⁰ M, 5×10⁻¹¹ M, 10⁻¹¹ M, 5×10⁻¹² M, 10⁻¹² M, 5×10⁻¹³ M, 10⁻¹³ M, 5×10⁻¹⁴ M, 10⁻¹⁴ M, 5×10⁻¹⁵ M, and 10⁻¹⁵ M.

[0312] Gene Therapy

[0313] In a specific embodiment, nucleic acids comprising sequences encoding antibodies or functional derivatives thereof, are administered to treat, inhibit or prevent a disease or disorder associated with aberrant expression and/or activity of a polypeptide of the invention, by way of gene therapy. Gene therapy refers to therapy performed by the administration to a subject of an expressed or expressible nucleic acid. In this embodiment of the invention, the nucleic acids produce their encoded protein that mediates a therapeutic effect.

[0314] Any of the methods for gene therapy available in the art can be used according to the present invention. Exemplary methods are described below.

[0315] For general reviews of the methods of gene therapy, see Goldspiel et al., Clinical Pharmacy 12:488-505 (1993); Wu and Wu, Biotherapy 3:87-95 (1991); Tolstoshev, Ann. Rev. Pharmacol. Toxicol. 32:573-596 (1993); Mulligan, Science 260:926-932 (1993); and Morgan and Anderson, Ann. Rev. Biochem. 62:191-217 (1993); May, TIBTECH 11(5):155-215 (1993). Methods commonly known in the art of recombinant DNA technology which can be used are described in Ausubel et al. (eds.), Current Protocols in Molecular Biology, John Wiley & Sons, NY (1993); and Kriegler, Gene Transfer and Expression, A Laboratory Manual, Stockton Press, NY (1990).

[0316] In a preferred embodiment, the compound comprises nucleic acid sequences encoding an antibody, said nucleic acid sequences being part of expression vectors that express the antibody or fragments or chimeric proteins or heavy or light chains thereof in a suitable host. In particular, such nucleic acid sequences have promoters operably linked to the antibody coding region, said promoter being inducible or constitutive, and, optionally, tissue-specific. In another particular embodiment, nucleic acid molecules are used in which the antibody coding sequences and any other desired sequences are flanked by regions that promote homologous recombination at a desired site in the genome, thus providing for intrachromosomal expression of the antibody encoding nucleic acids (Koller and Smithies, Proc. Natl. Acad. Sci. USA 86:8932-8935 (1989); Zijistra et al., Nature 342:435-438 (1989). In specific embodiments, the expressed antibody molecule is a single chain antibody; alternatively, the nucleic acid sequences include sequences encoding both the heavy and light chains, or fragments thereof, of the antibody.

[0317] Delivery of the nucleic acids into a patient may be either direct, in which case the patient is directly exposed to the nucleic acid or nucleic acid-carrying vectors, or indirect, in which case, cells are first transformed with the nucleic acids in vitro, then transplanted into the patient. These two approaches are known, respectively, as in vivo or ex vivo gene therapy.

[0318] In a specific embodiment, the nucleic acid sequences are directly administered in vivo, where it is expressed to produce the encoded product. This can be accomplished by any of numerous methods known in the art, e.g., by constructing them as part of an appropriate nucleic acid expression vector and administering it so that they become intracellular, e.g., by infection using defective or attenuated retrovirals or other viral vectors (see U.S. Pat. No. 4,980,286), or by direct injection of naked DNA, or by use of microparticle bombardment (e.g., a gene gun; Biolistic, Dupont), or coating with lipids or cell-surface receptors or transfecting agents, encapsulation in liposomes, microparticles, or microcapsules, or by administering them in linkage to a peptide which is known to enter the nucleus, by administering it in linkage to a ligand subject to receptor-mediated endocytosis (see, e.g., Wu and Wu, J. Biol. Chem. 262:4429-4432 (1987)) (which can be used to target cell types specifically expressing the receptors), etc. In another embodiment, nucleic acid-ligand complexes can be formed in which the ligand comprises a fusogenic viral peptide to disrupt endosomes, allowing the nucleic acid to avoid lysosomal degradation. In yet another embodiment, the nucleic acid can be targeted in vivo for cell specific uptake and expression, by targeting a specific receptor (see, e.g., PCT Publications WO 92/06180; WO 92/22635; WO92/20316; WO93/14188, WO 93/20221). Alternatively, the nucleic acid can be introduced intracellularly and incorporated within host cell DNA for expression, by homologous recombination (Koller and Smithies, Proc. Natl. Acad. Sci. USA 86:8932-8935 (1989); Zijlstra et al., Nature 342:435-438 (1989)).

[0319] In a specific embodiment, viral vectors that contains nucleic acid sequences encoding an antibody of the invention are used. For example, a retroviral vector can be used (see Miller et al., Meth. Enzymol. 217:581-599 (1993)). These retroviral vectors contain the components necessary for the correct packaging of the viral genome and integration into the host cell DNA. The nucleic acid sequences encoding the antibody to be used in gene therapy are cloned into one or more vectors, which facilitates delivery of the gene into a patient. More detail about retroviral vectors can be found in Boesen et al., Biotherapy 6:291-302 (1994), which describes the use of a retroviral vector to deliver the mdr1 gene to hematopoietic stem cells in order to make the stem cells more resistant to chemotherapy. Other references illustrating the use of retroviral vectors in gene therapy are: Clowes et al., J. Clin. Invest. 93:644-651 (1994); Kiem et al., Blood 83:1467-1473 (1994); Salmons and Gunzberg, Human Gene Therapy 4:129-141 (1993); and Grossman and Wilson, Curr. Opin. in Genetics and Devel. 3:110-114 (1993).

[0320] Adenoviruses are other viral vectors that can be used in gene therapy. Adenoviruses are especially attractive vehicles for delivering genes to respiratory epithelia. Adenoviruses naturally infect respiratory epithelia where they cause a mild disease. Other targets for adenovirus-based delivery systems are liver, the central nervous system, endothelial cells, and muscle. Adenoviruses have the advantage of being capable of infecting non-dividing cells. Kozarsky and Wilson, Current Opinion in Genetics and Development 3:499-503 (1993) present a review of adenovirus-based gene therapy. Bout et al., Human Gene Therapy 5:3-10 (1994) demonstrated the use of adenovirus vectors to transfer genes to the respiratory epithelia of rhesus monkeys. Other instances of the use of adenoviruses in gene therapy can be found in Rosenfeld et al., Science 252:431-434 (1991); Rosenfeld et al., Cell 68:143-155 (1992); Mastrangeli et al., J. Clin. Invest. 91:225-234 (1993); PCT Publication WO94/12649; and Wang, et al., Gene Therapy 2:775-783 (1995). In a preferred embodiment, adenovirus vectors are used.

[0321] Adeno-associated virus (AAV) has also been proposed for use in gene therapy (Walsh et al., Proc. Soc. Exp. Biol. Med. 204:289-300 (1993); U.S. Pat. No. 5,436,146).

[0322] Another approach to gene therapy involves transferring a gene to cells in tissue culture by such methods as electroporation, lipofection, calcium phosphate mediated transfection, or viral infection. Usually, the method of transfer includes the transfer of a selectable marker to the cells. The cells are then placed under selection to isolate those cells that have taken up and are expressing the transferred gene. Those cells are then delivered to a patient.

[0323] In this embodiment, the nucleic acid is introduced into a cell prior to administration in vivo of the resulting recombinant cell. Such introduction can be carried out by any method known in the art, including but not limited to transfection, electroporation, microinjection, infection with a viral or bacteriophage vector containing the nucleic acid sequences, cell fusion, chromosome-mediated gene transfer, microcell-mediated gene transfer, spheroplast fusion, etc. Numerous techniques are known in the art for the introduction of foreign genes into cells (see, e.g., Loeffler and Behr, Meth. Enzymol. 217:599-618 (1993); Cohen et al., Meth. Enzymol. 217:618-644 (1993); Cline, Pharmac. Ther. 29:69-92 m (1985) and may be used in accordance with the present invention, provided that the necessary developmental and physiological functions of the recipient cells are not disrupted. The technique should provide for the stable transfer of the nucleic acid to the cell, so that the nucleic acid is expressible by the cell and preferably heritable and expressible by its cell progeny.

[0324] The resulting recombinant cells can be delivered to a patient by various methods known in the art. Recombinant blood cells (e.g., hematopoietic stem or progenitor cells) are preferably administered intravenously. The amount of cells envisioned for use depends on the desired effect, patient state, etc., and can be determined by one skilled in the art.

[0325] Cells into which a nucleic acid can be introduced for purposes of gene therapy encompass any desired, available cell type, and include but are not limited to, epithelial cells, endothelial cells, keratinocytes, fibroblasts, muscle cells, hepatocytes; blood cells such as T lymphocytes, B lymphocytes, monocytes, macrophages, neutrophils, eosinophils, megakaryocytes, granulocytes; various stem or progenitor cells, in particular hematopoietic stem or progenitor cells, e.g., as obtained from bone marrow, umbilical cord blood, peripheral blood, fetal liver, etc.

[0326] In a preferred embodiment, the cell used for gene therapy is autologous to the patient.

[0327] In an embodiment in which recombinant cells are used in gene therapy, nucleic acid sequences encoding an antibody are introduced into the cells such that they are expressible by the cells or their progeny, and the recombinant cells are then administered in vivo for therapeutic effect. In a specific embodiment, stem or progenitor cells are used. Any stem and/or progenitor cells which can be isolated and maintained in vitro can potentially be used in accordance with this embodiment of the present invention (see e.g. PCT Publication WO 94/08598; Stemple and Anderson, Cell 71:973-985 (1992); Rheinwald, Meth. Cell Bio. 21A:229 (1980); and Pittelkow and Scott, Mayo Clinic Proc. 61:771 (1986)).

[0328] In a specific embodiment, the nucleic acid to be introduced for purposes of gene therapy comprises an inducible promoter operably linked to the coding region, such that expression of the nucleic acid is controllable by the presence or absence of an appropriate inducer of transcription.

[0329] Demonstration of Therapeutic or Prophylactic Activity

[0330] The compounds or pharmaceutical compositions of the invention are preferably tested in vitro, and then in vivo for the desired therapeutic or prophylactic activity, prior to use in humans. For example, in vitro assays to demonstrate the therapeutic or prophylactic utility of a compound or pharmaceutical composition include, the effect of a compound on a cell line or a patient tissue sample. The effect of the compound or composition on the cell line and/or tissue sample can be determined utilizing techniques known to those of skill in the art including, but not limited to, rosette formation assays and cell lysis assays. In accordance with the invention, in vitro assays which can be used to determine whether administration of a specific compound is indicated, include in vitro cell culture assays in which a patient tissue sample is grown in culture, and exposed to or otherwise administered a compound, and the effect of such compound upon the tissue sample is observed.

[0331] Therapeutic/Prophylactic Administration and Composition

[0332] The invention provides methods of treatment, inhibition and prophylaxis by administration to a subject of an effective amount of a compound or pharmaceutical composition of the invention, preferably a polypeptide or antibody of the invention. In a preferred embodiment, the compound is substantially purified (e.g., substantially free from substances that limit its effect or produce undesired side-effects). The subject is preferably an animal, including but not limited to animals such as cows, pigs, horses, chickens, cats, dogs, etc., and is preferably a mammal, and most preferably human.

[0333] Formulations and methods of administration that can be employed when the compound comprises a nucleic acid or an immunoglobulin are described above; additional appropriate formulations and routes of administration can be selected from among those described herein below.

[0334] Various delivery systems are known and can be used to administer a compound of the invention, e.g., encapsulation in liposomes, microparticles, microcapsules, recombinant cells capable of expressing the compound, receptor-mediated endocytosis (see, e.g., Wu and Wu, J. Biol. Chem. 262:4429-4432 (1987)), construction of a nucleic acid as part of a retroviral or other vector, etc. Methods of introduction include but are not limited to intradermal, intramuscular, intraperitoneal, intravenous, subcutaneous, intranasal, epidural, and oral-routes. The compounds or compositions may be administered by any convenient route, for example by infusion or bolus injection, by absorption through epithelial or mucocutaneous linings (e.g., oral mucosa, rectal and intestinal mucosa, etc.) and may be administered together with other biologically active agents. Administration can be systemic or local. In addition, it may be desirable to introduce the pharmaceutical compounds or compositions of the invention into the central nervous system by any suitable route, including intraventricular and intrathecal injection; intraventricular injection may be facilitated by an intraventricular catheter, for example, attached to a reservoir, such as an Ommaya reservoir. Pulmonary administration can also be employed, e.g., by use of an inhaler or nebulizer, and formulation with an aerosolizing agent.

[0335] In a specific embodiment, it may be desirable to administer the pharmaceutical compounds or compositions of the invention locally to the area in need of treatment; this may be achieved by, for example, and not by way of limitation, local infusion during surgery, topical application, e.g., in conjunction with a wound dressing after surgery, by injection, by means of a catheter, by means of a suppository, or by means of an implant, said implant being of a porous, non-porous, or gelatinous material, including membranes, such as sialastic membranes, or fibers. Preferably, when administering a protein, including an antibody, of the invention, care must be taken to use materials to which the protein does not absorb.

[0336] In another embodiment, the compound or composition can be delivered in a vesicle, in particular a liposome (see Langer, Science 249:1527-1533 (1990); Treat et al., in Liposomes in the Therapy of Infectious Disease and Cancer, Lopez-Berestein and Fidler (eds.), Liss, N.Y., pp. 353-365 (1989); Lopez-Berestein, ibid., pp. 317-327; see generally ibid.)

[0337] In yet another embodiment, the compound or composition can be delivered in a controlled release system. In one embodiment, a pump may be used (see Langer, supra; Sefton, CRC Crit. Ref. Biomed. Eng. 14:201 (1987); Buchwald et al., Surgery 88:507 (1980); Saudek et al., N. Engl. J. Med. 321:574 (1989)). In another embodiment, polymeric materials can be used (see Medical Applications of Controlled Release, Langer and Wise (eds.), CRC Pres., Boca Raton, Fla. (1974); Controlled Drug Bioavailability, Drug Product Design and Performance, Smolen and Ball (eds.), Wiley, N.Y. (1984); Ranger and Peppas, J., Macromol. Sci. Rev. Macromol. Chem. 23:61 (1983); see also Levy et al., Science 228:190 (1985); During et al., Ann. Neurol. 25:351 (1989); Howard et al., J.Neurosurg. 71:105 (1989)). In yet another embodiment, a controlled release system can be placed in proximity of the therapeutic target, e.g., the brain, thus requiring only a fraction of the systemic dose (see, e.g., Goodson, in Medical Applications of Controlled Release, supra, vol. 2, pp. 115-138 (1984)).

[0338] Other controlled release systems are discussed in the review by Langer (Science 249:1527-1533 (1990)).

[0339] In a specific embodiment where the compound of the invention is a nucleic acid encoding a protein, the nucleic acid can be administered in vivo to promote expression of its encoded protein, by constructing it as part of an appropriate nucleic acid expression vector and administering it so that it becomes intracellular, e.g., by use of a retroviral vector (see U.S. Pat. No. 4,980,286), or by direct injection, or by use of microparticle bombardment (e.g., a gene gun; Biolistic, Dupont), or coating with lipids or cell-surface receptors or transfecting agents, or by administering it in linkage to a homeobox-like peptide which is known to enter the nucleus (see e.g., Joliot et al., Proc. Natl. Acad. Sci. USA 88:1864-1868 (1991)), etc. Alternatively, a nucleic acid can be introduced intracellularly and incorporated within host cell DNA for expression, by homologous recombination.

[0340] The present invention also provides pharmaceutical compositions. Such compositions comprise a therapeutically effective amount of a compound, and a pharmaceutically acceptable carrier. In a specific embodiment, the term “pharmaceutically acceptable” means approved by a regulatory agency of the Federal or a state government or listed in the U.S. Pharmacopeia or other generally recognized pharmacopeia for use in animals, and more particularly in humans. The term “carrier” refers to a diluent, adjuvant, excipient, or vehicle with which the therapeutic is administered. Such pharmaceutical carriers can be sterile liquids, such as water and oils, including those of petroleum, animal, vegetable or synthetic origin, such as peanut oil, soybean oil, mineral oil, sesame oil and the like. Water is a preferred carrier when the pharmaceutical composition is administered intravenously. Saline solutions and aqueous dextrose and glycerol solutions can also be employed as liquid carriers, particularly for injectable solutions. Suitable pharmaceutical excipients include starch, glucose, lactose, sucrose, gelatin, malt, rice, flour, chalk, silica gel, sodium stearate, glycerol monostearate, talc, sodium chloride, dried skim milk, glycerol, propylene, glycol, water, ethanol and the like. The composition, if desired, can also contain minor amounts of wetting or emulsifying agents, or pH buffering agents. These compositions can take the form of solutions, suspensions, emulsion, tablets, pills, capsules, powders, sustained-release formulations and the like. The composition can be formulated as a suppository, with traditional binders and carriers such as triglycerides. Oral formulation can include standard carriers such as pharmaceutical grades of mannitol, lactose, starch, magnesium stearate, sodium saccharine, cellulose, magnesium carbonate, etc. Examples of suitable pharmaceutical carriers are described in “Remington's Pharmaceutical Sciences” by E. W. Martin. Such compositions will contain a therapeutically effective amount of the compound, preferably in purified form, together with a suitable amount of carrier so as to provide the form for proper administration to the patient. The formulation should suit the mode of administration.

[0341] In a preferred embodiment, the composition is formulated in accordance with routine procedures as a pharmaceutical composition adapted for intravenous administration to human beings. Typically, compositions for intravenous administration are solutions in sterile isotonic aqueous buffer. Where necessary, the composition may also include a solubilizing agent and a local anesthetic such as lignocaine to ease pain at the site of the injection. Generally, the ingredients are supplied either separately or mixed together in unit dosage form, for example, as a dry lyophilized powder or water free concentrate in a hermetically sealed container such as an ampoule or sachette indicating the quantity of active agent. Where the composition is to be administered by infusion, it can be dispensed with an infusion bottle containing sterile pharmaceutical grade water or saline. Where the composition is administered by injection, an ampoule of sterile water for injection or saline can be provided so that the ingredients may be mixed prior to administration.

[0342] The compounds of the invention can be formulated as neutral or salt forms. Pharmaceutically acceptable salts include those formed with anions such as those derived from hydrochloric, phosphoric, acetic, oxalic, tartaric acids, etc., and those formed with cations such as those derived from sodium, potassium, ammonium, calcium, ferric hydroxides, isopropylamine, triethylamine, 2-ethylamino ethanol, histidine, procaine, etc.

[0343] The amount of the compound of the invention which will be effective in the treatment, inhibition and prevention of a disease or disorder associated with aberrant expression and/or activity of a polypeptide of the invention can be determined by standard clinical techniques. In addition, in vitro assays may optionally be employed to help identify optimal dosage ranges. The precise dose to be employed in the formulation will also depend on the route of administration, and the seriousness of the disease or disorder, and should be decided according to the judgment of the practitioner and each patient's circumstances. Effective doses may be extrapolated from dose-response curves derived from in vitro or animal model test systems.

[0344] For antibodies, the dosage administered to a patient is typically 0.1 mg/kg to 100 mg/kg of the patient's body weight. Preferably, the dosage administered to a patient is between 0.1 mg/kg and 20 mg/kg of the patient's body weight, more preferably 1 mg/kg to 10 mg/kg of the patient's body weight. Generally, human antibodies have a longer half-life within the human body than antibodies from other species due to the immune response to the foreign polypeptides. Thus, lower dosages of human antibodies and less frequent administration is often possible. Further, the dosage and frequency of administration of antibodies of the invention may be reduced by enhancing uptake and tissue penetration (e.g., into the brain) of the antibodies by modifications such as, for example, lipidation.

[0345] The invention also provides a pharmaceutical pack or kit comprising one or more containers filled with one or more of the ingredients of the pharmaceutical compositions of the invention. Optionally associated with such container(s) can be a notice in the form prescribed by a governmental agency regulating the manufacture, use or sale of pharmaceuticals or biological products, which notice reflects approval by the agency of manufacture, use or sale for human administration.

[0346] Diagnosis and Imaging

[0347] Labeled antibodies, and derivatives and analogs thereof, which specifically bind to a polypeptide of interest can be used for diagnostic purposes to detect, diagnose, or monitor diseases, disorders, and/or conditions associated with the aberrant expression and/or activity of a polypeptide of the invention. The invention provides for the detection of aberrant expression of a polypeptide of interest, comprising (a) assaying the expression of the polypeptide of interest in cells or body fluid of an individual using one or more antibodies specific to the polypeptide interest and (b) comparing the level of gene expression with a standard gene expression level, whereby an increase or decrease in the assayed polypeptide gene expression level compared to the standard expression level is indicative of aberrant expression.

[0348] The invention provides a diagnostic assay for diagnosing an excretory system disorder, comprising (a) assaying the expression of the polypeptide of interest in cells or body fluid of an individual using one or more antibodies specific to the polypeptide interest and (b) comparing the level of gene expression with a standard gene expression level, whereby an increase or decrease in the assayed polypeptide gene expression level compared to the standard expression level is indicative of a particular disorder. With respect to cancer, the presence of a relatively high amount of transcript in biopsied tissue from an individual may indicate a predisposition for the development of the disease, or may provide a means for detecting the disease prior to the appearance of actual clinical symptoms. A more definitive diagnosis of this type may allow health professionals to employ preventative measures or aggressive treatment earlier thereby preventing the development or further progression of the cancer.

[0349] Antibodies of the invention can be used to assay protein levels in a biological sample using classical immunohistological methods known to those of skill in the art (e.g., see Jalkanen et al., J. Cell. Biol. 101:976-985 (1985); Jalkanen et al., J. Cell . Biol. 105:3087-3096 (1987)). Other antibody-based methods useful for detecting protein gene expression include immunoassays, such as the enzyme linked immunosorbent assay (ELISA) and the radioimmunoassay (RIA). Suitable antibody assay labels are known in the art and include enzyme labels, such as, glucose oxidase; radioisotopes, such as iodine (125I, 121I), carbon (14C), sulfur (35S), tritium (3H), indium (112In), and technetium (99Tc); luminescent labels, such as luminol; and fluorescent labels, such as fluorescein and rhodamine, and biotin.

[0350] One facet of the invention is the detection and diagnosis of a disease or disorder associated with aberrant expression of a polypeptide of interest in an animal, preferably a mammal and most preferably a human. A preferred embodiment of the invention is the detection and diagnosis of a disease or disorder of the excretory system associated with aberrant expression of an excretory system antigen in an animal, preferably a mammal and most preferably a human. In one embodiment, diagnosis comprises: a) administering (for example, parenterally, subcutaneously, or intraperitoneally) to a subject an effective amount of a labeled molecule which specifically binds to the polypeptide of interest; b) waiting for a time interval following the administering for permitting the labeled molecule to preferentially concentrate at sites in the subject where the polypeptide is expressed (and for unbound labeled molecule to be cleared to background level); c) determining background level; and d) detecting the labeled molecule in the subject, such that detection of labeled molecule above the background level indicates that the subject has a particular disease or disorder associated with aberrant expression of the polypeptide of interest. Background level can be determined by various methods including, comparing the amount of labeled molecule detected to a standard value previously determined for a particular system.

[0351] It will be understood in the art that the size of the subject and the imaging system used will determine the quantity of imaging moiety needed to produce diagnostic images. In the case of a radioisotope moiety, for a human subject, the quantity of radioactivity injected will normally range from about 5 to 20 millicuries of 99 mTc. The labeled antibody or antibody fragment will then preferentially accumulate at the location of cells which contain the specific protein. In vivo tumor imaging is described in S. W. Burchiel et al., “Immunopharmacokinetics of Radiolabeled Antibodies and Their Fragments.” (Chapter 13 in Tumor Imaging: The Radiochemical Detection of Cancer, S. W. Burchiel and B. A. Rhodes, eds., Masson Publishing Inc. (1982)).

[0352] Depending on several variables, including the type of label used and the mode of administration, the time interval following the administration for permitting the labeled molecule to preferentially concentrate at sites in the subject and for unbound labeled molecule to be cleared to background level is 6 to 48 hours or 6 to 24 hours or 6 to 12 hours. In another embodiment the time interval following administration is 5 to 20 days or 5 to 10 days.

[0353] In an embodiment, monitoring of the disease or disorder is carried out by repeating the method for diagnosing the disease or disorder, for example, one month after initial diagnosis, six months after initial diagnosis, one year after initial diagnosis, etc.

[0354] Presence of the labeled molecule can be detected in the patient using methods known in the art for in vivo scanning. These methods depend upon the type of label used. Skilled artisans will be able to determine the appropriate method for detecting a particular label. Methods and devices that may be used in the diagnostic methods of the invention include, but are not limited to, computed tomography (CT), whole body scan such as position emission tomography (PET), magnetic resonance imaging (MRI), and sonography.

[0355] In a specific embodiment, the molecule is labeled with a radioisotope and is detected in the patient using a radiation responsive surgical instrument (Thurston et al., U.S. Pat. No. 5,441,050). In another embodiment, the molecule is labeled with a fluorescent compound and is detected in the patient using a fluorescence responsive scanning instrument. In another embodiment, the molecule is labeled with a positron emitting metal and is detected in the patent using positron emission-tomography. In yet another embodiment, the molecule is labeled with a paramagnetic label and is detected in a patient using magnetic resonance imaging (MRI).

[0356] Kits

[0357] The present invention provides kits that can be used in the above methods. In one embodiment, a kit comprises an antibody of the invention, preferably a purified antibody, in one or more containers. In a specific embodiment, the kits of the present invention contain a substantially isolated polypeptide comprising an epitope, which is specifically immunoreactive with an antibody included in the kit. Preferably, the kits of the present invention further comprise a control antibody which does not react with the polypeptide of interest. In another specific embodiment, the kits of the present invention contain a means for detecting the binding of an antibody to a polypeptide of interest (e.g., the antibody may be conjugated to a detectable substrate such as a fluorescent compound, an enzymatic substrate, a radioactive compound or a luminescent compound, or a second antibody which recognizes the first antibody may be conjugated to a detectable substrate).

[0358] In another specific embodiment of the present invention, the kit is a diagnostic kit for use in screening serum-containing antibodies specific against proliferative and/or cancerous polynucleotides and polypeptides. Such a kit may include a control antibody that does not react with the polypeptide of interest. Such a kit may include a substantially isolated polypeptide antigen comprising an epitope which is specifically immunoreactive with at least one anti-polypeptide antigen antibody. Further, such a kit includes means for detecting the binding of said antibody to the antigen (e.g., the antibody may be conjugated to a fluorescent compound such as fluorescein or rhodamine, which can be detected by flow cytometry). In specific embodiments, the kit may include a recombinantly produced or chemically synthesized polypeptide antigen. The polypeptide antigen of the kit may also be attached to a solid support.

[0359] In a more specific embodiment, the detecting means of the above-described kit includes a solid support to which said polypeptide antigen is attached. Such a kit may also include a non-attached reporter-labeled anti-human antibody. In this embodiment, binding of the antibody to the polypeptide antigen can be detected by binding of the said reporter-labeled antibody.

[0360] In an additional embodiment, the invention includes a diagnostic kit for use in screening serum-containing antigens of the polypeptide of the invention. The diagnostic kit includes a substantially isolated antibody specifically immunoreactive with polypeptide or polynucleotide antigens, and means for detecting the binding of the polynucleotide or polypeptide antigen to the antibody. In one embodiment, the antibody is attached to a solid support. In a specific embodiment, the antibody may be a monoclonal antibody. The detecting means of the kit may include a second, labeled monoclonal antibody. Alternatively, or in addition, the detecting means may include a labeled, competing antigen.

[0361] In one diagnostic configuration, test serum is reacted with a solid phase reagent having a surface-bound antigen obtained by the methods of the present invention. After binding with specific antigen antibody to the reagent and removing unbound serum components by washing, the reagent is reacted with reporter-labeled anti-human antibody to bind reporter to the reagent in proportion to the amount of bound anti-antigen antibody on the solid support. The reagent is again washed to remove unbound labeled antibody, and the amount of reporter associated with the reagent is determined. Typically, the reporter is an enzyme, which is detected by incubating the solid phase in the presence of a suitable fluorometric, luminescent or colorimetric substrate (Sigma, St. Louis, Mo.).

[0362] The solid surface reagent in the above assay is prepared by known techniques for attaching protein material to solid support material, such as polymeric beads, dip sticks, 96-well plate or filter material. These attachment methods generally include non-specific adsorption of the protein to the support or covalent attachment of the protein, typically through a free amine group, to a chemically reactive group on the solid support, such as an activated carboxyl, hydroxyl, or aldehyde group. Alternatively, streptavidin coated plates can be used in conjunction with biotinylated antigen(s).

[0363] Thus, the invention provides an assay system or kit for carrying out this diagnostic method. The kit generally includes a support with surface-bound recombinant antigens, and a reporter-labeled anti-human antibody for detecting surface-bound anti-antigen antibody.

[0364] Uses of the Polynucleotides

[0365] Each of the polynucleotides identified herein can be used in numerous ways as reagents. The following description should be considered exemplary and utilizes known techniques.

[0366] The polynucleotides of the present invention are useful for chromosome identification. There exists an ongoing need to identify new chromosome markers, since few chromosome marking reagents, based on actual sequence data (repeat polymorphisms), are presently available. Each sequence is specifically targeted to and can hybridize with a particular location on an individual human chromosome, thus each polynucleotide of the present invention can routinely be used as a chromosome marker using techniques known in the art. Table 1A, column 8 provides the chromosome location of some of the polynucleotides of the invention.

[0367] Briefly, sequences can be mapped to chromosomes by preparing PCR primers (preferably at least 15 bp (e.g., 15-25 bp) from the sequences shown in SEQ ID NO: X. Primers can optionally be selected using computer analysis so that primers do not span more than one predicted exon in the genomic DNA. These primers are then used for PCR screening of somatic cell hybrids containing individual human chromosomes. Only those hybrids containing the human gene corresponding to SEQ ID NO: X will yield an amplified fragment.

[0368] Similarly, somatic hybrids provide a rapid method of PCR mapping the polynucleotides to particular chromosomes. Three or more clones can be assigned per day using a single thermal cycler. Moreover, sublocalization of the polynucleotides can be achieved with panels of specific chromosome fragments. Other gene mapping strategies that can be used include in situ hybridization, prescreening with labeled flow-sorted chromosomes, preselection by hybridization to construct chromosome specific-cDNA libraries, and computer mapping techniques (See, e.g., Shuler, Trends Biotechnol 16:456-459 (1998) which is hereby incorporated by reference in its entirety).

[0369] Precise chromosomal location of the polynucleotides can also be achieved using fluorescence in situ hybridization (FISH) of a metaphase chromosomal spread. This technique uses polynucleotides as short as 500 or 600 bases; however, polynucleotides 2,000-4,000 bp are preferred. For a review of this technique, see Verma et al., “Human Chromosomes: a Manual of Basic Techniques,” Pergamon Press, New York (1988).

[0370] For chromosome mapping, the polynucleotides can be used individually (to mark a single chromosome or a single site on that chromosome) or in panels (for marking multiple sites and/or multiple chromosomes).

[0371] Thus, the present invention also provides a method for chromosomal localization which involves (a) preparing PCR primers from the polynucleotide sequences in Table 1A and/or Table 2 and SEQ ID NO: X and (b) screening somatic cell hybrids containing individual chromosomes.

[0372] The polynucleotides of the present invention would likewise be useful for radiation hybrid mapping, HAPPY mapping, and long range restriction mapping. For a review of these techniques and others known in the art, see, e.g. Dear, “Genome Mapping: A Practical Approach,” IRL Press at Oxford University Press, London (1997); Aydin, J. Mol. Med. 77:691-694 (1999); Hacia et al., Mol. Psychiatry 3:483-492 (1998); Herrick et al., Chromosome Res. 7:409-423 (1999); Hamilton et al., Methods Cell Biol. 62:265-280 (2000); and/or Ott, J. Hered. 90:68-70 (1999), each of which is hereby incorporated by reference in its entirety.

[0373] Once a polynucleotide has been mapped to a precise chromosomal location, the physical position of the polynucleotide can be used in linkage analysis. Linkage analysis establishes coinheritance between a chromosomal location and presentation of a particular disease. (Disease mapping data are found, for example, in V. McKusick, Mendelian Inheritance in Man (available on line through Johns Hopkins University Welch Medical Library).) Column 9 of Table 1A provides an OMIM reference identification number of diseases associated with the cytologic band disclosed in column 8 of Table 1A, as determined using techniques described herein and by reference to Table 5. Assuming 1 megabase mapping resolution and one gene per 20 kb, a cDNA precisely localized to a chromosomal region associated with the disease could be one of 50-500 potential causative genes.

[0374] Thus, once coinheritance is established, differences in a polynucleotide of the invention and the corresponding gene between affected and unaffected individuals can be examined. First, visible structural alterations in the chromosomes, such as deletions or translocations, are examined in chromosome spreads or by PCR. If no structural alterations exist, the presence of point mutations are ascertained. Mutations observed in some or all affected individuals, but not in normal individuals, indicates that the mutation may cause the disease. However, complete sequencing of the polypeptide and the corresponding gene from several normal individuals is required to distinguish the mutation from a polymorphism. If a new polymorphism is identified, this polymorphic polypeptide can be used for further linkage analysis.

[0375] Furthermore, increased or decreased expression of the gene in affected individuals as compared to unaffected individuals can be assessed using the polynucleotides- of the invention. Any of these alterations (altered expression, chromosomal rearrangement, or mutation) can be used as a diagnostic or prognostic marker. Diagnostic and prognostic methods, kits and reagents encompassed by the present invention are briefly described below and more thoroughly elsewhere herein (see e.g., the sections labeled “Antibodies”, “Diagnostic Assays”, and “Methods for Detecting Excretory System Disease, Including Cancer”).

[0376] Thus, the invention also provides a diagnostic method useful during diagnosis of a disorder, involving measuring the expression level of polynucleotides of the present invention in cells or body fluid from an individual and comparing the measured gene expression level with a standard level of polynucleotide expression level, whereby an increase or decrease in the gene expression level compared to the standard is indicative of a disorder. Additional non-limiting examples of diagnostic methods encompassed by the present invention are more thoroughly described elsewhere herein (see, e.g., Example 12).

[0377] In still another embodiment, the invention includes a kit for analyzing samples for the presence of proliferative and/or cancerous polynucleotides derived from a test subject, as further described herein. In a general embodiment, the kit includes at least one polynucleotide probe containing a nucleotide sequence that will specifically hybridize with a polynucleotide of the invention and a suitable container. In a specific embodiment, the kit includes two polynucleotide probes defining an internal region of the polynucleotide of the invention, where each probe has one strand containing a 31′mer-end internal to the region. In a further embodiment, the probes may be useful as primers for polymerase chain reaction amplification.

[0378] Where a diagnosis of a related disorder, including, for example, diagnosis of a tumor, has already been made according to conventional methods, the present invention is useful as a prognostic indicator, whereby patients exhibiting enhanced or depressed polynucleotide of the invention expression will experience a worse clinical outcome relative to patients expressing the gene at a level nearer the standard level.

[0379] By “measuring the expression level of polynucleotides of the invention” is intended qualitatively or quantitatively measuring or estimating the level of the polypeptide of the invention or the level of the mRNA encoding the polypeptide of the invention in a first biological sample either directly (e.g., by determining or estimating absolute protein level or mRNA level) or relatively (e.g., by comparing to the polypeptide level or mRNA level in a second biological sample). Preferably, the polypeptide level or mRNA level in the first biological sample is measured or estimated and compared to a standard polypeptide level or mRNA level, the standard being taken from a second biological sample obtained from an individual not having the related disorder or being determined by averaging levels from a population of individuals not having a related disorder. As will be appreciated in the art, once a standard polypeptide level or mRNA level is known, it can be used repeatedly as a standard for comparison.

[0380] By “biological sample” is intended any biological sample obtained from an individual, body fluid, cell line, tissue culture, or other source which contains polypeptide of the present invention or the corresponding mRNA. As indicated, biological samples include body fluids (such as semen, lymph, vaginal pool, sera, plasma, urine, synovial fluid and spinal fluid) which contain the polypeptide of the present invention, and tissue sources found to express the polypeptide of the present invention. Methods for obtaining tissue biopsies and body fluids from mammals are well known in the art. Where the biological sample is to include mRNA, a tissue biopsy is the preferred source.

[0381] The method(s) provided above may preferably be applied in a diagnostic method and/or kits in which polynucleotides and/or polypeptides of the invention are attached to a solid support. In one exemplary method, the support may be a “gene chip” or a “biological chip” as described in U.S. Pat. Nos. 5,837,832, 5,874,219, and 5,856,174. Further, such a gene chip with polynucleotides of the invention attached may be used to identify polymorphisms between the isolated polynucleotide sequences of the invention, with polynucleotides isolated from a test subject. The knowledge of such polymorphisms (i.e., their location, as well as, their existence) would be beneficial in identifying disease loci for many disorders, such as for example, in neural disorders, immune system disorders, muscular disorders, reproductive disorders, gastrointestinal disorders, pulmonary disorders, digestive disorders, cardiovascular disorders, renal disorders, proliferative disorders, and/or cancerous diseases and conditions. Such a method is described in U.S. Pat. Nos. 5,858,659 and 5,856,104. The U.S. Patents referenced supra are hereby incorporated by reference in their entirety herein.

[0382] The present invention encompasses polynucleotides of the present invention that are chemically synthesized, or reproduced as peptide nucleic acids (PNA), or according to other methods known in the art. The use of PNAs would serve as the preferred form if the polynucleotides of the invention are incorporated onto a solid support, or gene chip. For the purposes of the present invention, a peptide nucleic acid (PNA) is a polyamide type of DNA analog and the monomeric units for adenine, guanine, thymine and cytosine are available commercially (Perceptive Biosystems). Certain components of DNA, such as phosphorus, phosphorus oxides, or deoxyribose derivatives, are not present in PNAs. As disclosed by Nielsen et al., Science 254:1497 (1991); and Egholm et al., Nature 365:666 (1993), PNAs bind specifically and tightly to complementary DNA strands and are not degraded by nucleases. In fact, PNA binds more strongly to DNA than DNA itself does. This is probably because there is no electrostatic repulsion between the two strands, and also the polyamide backbone is more flexible. Because of this, PNA/DNA duplexes bind under a wider range of stringency conditions than DNA/DNA duplexes, making it easier to perform multiplex hybridization. Smaller probes can be used than with DNA due to the strong binding. In addition, it is more likely that single base mismatches can be determined with PNA/DNA hybridization because a single mismatch in a PNA/DNA 15-mer lowers the melting point (T.sub.m) by 8°−20° C., vs. 4°-16° C. for the DNA/DNA 15-mer duplex. Also, the absence of charge groups in PNA means that hybridization can be done at low ionic strengths and reduce possible interference by salt during the analysis.

[0383] The compounds of the present invention have uses, which include, but are not limited to, detecting cancer in mammals. In particular the invention is useful during diagnosis of pathological cell proliferative neoplasias which include, but are not limited to: acute myelogenous leukemias including acute monocytic leukemia, acute myeloblastic leukemia, acute promyelocytic leukemia, acute myelomonocytic leukemia, acute erythroleukemia, acute megakaryocytic leukemia, and acute undifferentiated leukemia, etc.; and chronic myelogenous leukemias including chronic myelomonocytic leukemia, chronic granulocytic leukemia, etc. Preferred mammals include monkeys, apes, cats, dogs, cows, pigs, horses, rabbits and humans. Particularly preferred are humans.

[0384] The compounds of the present invention have preferred uses, which include, but are not limited to, detecting excretory system cancer in mammals. In particular the invention is useful during diagnosis of pathological cell proliferative neoplasias which include, but are not limited to: nephroblastoma, renal cell cancer hypernephroma, transitional cell cancer, squamous cell cancer, Wilm's tumor, superficial bladder cancer, invasive bladder cancer, carcinoma of the ureter, and urethra cancer. Preferred mammals include monkeys, apes, cats, dogs, cows, pigs, horses, rabbits and humans. Particularly preferred are humans.

[0385] Pathological cell proliferative disorders are often associated with inappropriate activation of proto-oncogenes. (Gelmann, E. P. et al., “The Etiology of Acute Leukemia: Molecular Genetics and Viral Oncology,” in Neoplastic Diseases of the Blood, Vol 1., Wiemik, P. H. et al. eds., 161-182 (1985)). Neoplasias are now believed to result from the qualitative alteration of a normal cellular gene product, or from the quantitative modification of gene expression by insertion into the chromosome of a viral sequence, by chromosomal translocation of a gene to a more actively transcribed region, or by some other mechanism. (Gelmann et al., supra) It is likely that mutated or altered expression of specific genes is involved in the pathogenesis of some leukemias, among other tissues and cell types. (Gelmann et al., supra) Indeed, the human counterparts of the oncogenes involved in some animal neoplasias have been amplified or translocated in some cases of human leukemia and carcinoma. (Gelmann et al., stipra)

[0386] For example, c-myc expression is highly amplified in the non-lymphocytic leukemia cell line HL-60. When HL-60 cells are chemically induced to stop proliferation, the level of c-myc is found to be downregulated. (International Publication Number WO 91/15580). However, it has been shown that exposure of HL-60 cells to a DNA construct that is complementary to the 5′ end of c-myc or c-myb blocks translation of the corresponding mRNAs which downregulates expression of the c-myc or c-myb proteins and causes arrest of cell proliferation and differentiation of the treated cells. (International Publication Number WO 91/15580; Wickstrom et al., Proc. Natl. Acad. Sci. 85:1028 (1988); Anfossi et al., Proc. Natl. Acad. Sci. 86:3379 (1989)). However, the skilled artisan would appreciate the present invention's usefulness is not be limited to treatment, prevention, diagnosis and/or prognosis, of proliferative disorders of cells and tissues of hematopoietic origin, in light of the numerous cells and cell types of varying origins which are known to exhibit proliferative phenotypes. In preferred embodiments, the compounds and/or methods of the invention are used to treat, prevent, diagnose, and/or prognose, proliferative disorders of excretory system cells and tissues.

[0387] In addition to the foregoing, a polynucleotide of the present invention can be used to control gene expression through triple helix formation or through antisense DNA or RNA. Antisense techniques are discussed, for example, in Okano, J. Neurochem. 56: 560 (1991); “Oligodeoxynucleotides as Antisense Inhibitors of Gene Expression, CRC Press, Boca Raton, Fla. (1988). Triple helix formation is discussed in, for instance Lee et al., Nucleic Acids Research 6: 3073 (1979); Cooney et al., Science 241:456 (1988); and Dervan et al., Science 251: 1360 (1991). Both methods rely on binding of the polynucleotide to a complementary DNA or RNA. For these techniques, preferred polynucleotides are usually oligonucleotides 20 to 40 bases in length and complementary to either the region of the gene involved in transcription (triple helix—see Lee et al., Nucd. Acids Res. 6:3073 (1979); Cooney et al., Science 241:456 (1988); and Dervan et al., Science 251:1360 (1991)) or to the mRNA itself (antisense—Okano, J. Neurochem. 56:560 (1991); Oligodeoxy-nucleotides as Antisense Inhibitors of Gene Expression, CRC Press, Boca Raton, Fla. (1988).) Triple helix formation optimally results in a shut-off of RNA transcription from DNA, while antisense RNA hybridization blocks translation of an mRNA molecule into polypeptide. The oligonucleotide described above can also be delivered to cells such that the antisense RNA or DNA may be expressed in vivo to inhibit production of polypeptide of the present invention antigens. Both techniques are effective in model systems, and the information disclosed herein can be used to design antisense or triple helix polynucleotides in an effort to treat disease, and in particular, for the treatment of proliferative diseases and/or conditions. Non-limiting antisense and triple helix methods encompassed by the present invention are more thoroughly described elsewhere herein (see, e.g., the section labeled “Antisense and Ribozyme (Antagonists)”).

[0388] Polynucleotides of the present invention are also useful in gene therapy. One goal of gene therapy is to insert a normal gene into an organism having a defective gene, in an effort to correct the genetic defect. The polynucleotides disclosed in the present invention offer a means of targeting such genetic defects in a highly accurate manner. Another goal is to insert a new gene that was not present in the host genome, thereby producing a new trait in the host cell. Additional non-limiting examples of gene therapy methods encompassed by the present invention are more thoroughly described elsewhere herein (see, e.g., the sections labeled “Gene Therapy Methods” and Examples 16, 17 and 18).

[0389] The polynucleotides are also useful for identifying individuals from minute biological samples. The United States military, for example, is considering the use of restriction fragment length polymorphism (RFLP) for identification of its personnel. In this technique, an individual's genomic DNA is digested with one or more restriction enzymes, and probed on a Southern blot to yield unique bands for identifying personnel. This method does not suffer from the current limitations of “Dog Tags” which can be lost, switched, or stolen, making positive identification difficult. The polynucleotides of the present invention can be used as additional DNA markers for RFLP.

[0390] The polynucleotides of the present invention can also be used as an alternative to RFLP, by determining the actual base-by-base DNA sequence of selected portions of an individual's genome. These sequences can be used to prepare PCR primers for amplifying and isolating such selected DNA, which can then be sequenced. Using this technique, individuals can be identified because each individual will have a unique set of DNA sequences. Once an unique ID database is established for an individual, positive identification of that individual, living or dead, can be made from extremely small tissue samples.

[0391] Forensic biology also benefits from using DNA-based identification techniques as disclosed herein. DNA sequences taken from very small biological samples such as tissues, e.g., hair or skin, or body fluids, e.g., blood, saliva, semen, synovial fluid, amniotic fluid, breast milk, lymph, pulmonary sputum or surfactant, urine, fecal matter, etc., can be amplified using PCR. In one prior art technique, gene sequences amplified from polymorphic loci, such as DQa class II HLA gene, are used in forensic biology to identify individuals. (Erlich, H., PCR Technology, Freeman and Co. (1992).) Once these specific polymorphic loci are amplified, they are digested with one or more restriction enzymes, yielding an identifying set of bands on a Southern blot probed with DNA corresponding to the DQa class II HLA gene. Similarly, polynucleotides of the present invention can be used as polymorphic markers for forensic purposes.

[0392] There is also a need for reagents capable of identifying the source of a particular tissue. Such need arises, for example, in forensics when presented with tissue of unknown origin. Appropriate reagents can comprise, for example, DNA probes or primers prepared from the sequences of the present invention, specific to tissues, including but not limited to, those sequences referred to in Table 1A. Panels of such reagents can identify tissue by species and/or by organ type. In a similar fashion, these reagents can be used to screen tissue cultures for contamination. Additional non-limiting examples of such uses are further described herein.

[0393] Because excretory system antigens are found expressed in excretory system, the polynucleotides of the present invention are also useful as hybridization probes for differential identification of the tissue(s) or cell type(s) present in a biological sample. Similarly, polypeptides and antibodies directed to polypeptides of the present invention are useful to provide immunological probes for differential identification of the tissue(s) (e.g., immunohistochemistry assays) or cell type(s) (e.g., immunocytochemistry assays). In a specific embodiment, the polynucleotides of the present invention are also useful as hybridization probes for differential identification of excretory system tissue(s) or cell type(s) present in a biological sample. Similarly, polypeptides and antibodies directed to polypeptides of the present invention are useful to provide immunological probes for differential identification of excretory system tissue(s) (e.g., immunohistochemistry assays) or cell type(s) (e.g., immunocytochemistry assays). In addition, for a number of disorders of the above tissues or cells, significantly higher or lower levels of gene expression of the polynucleotides/polypeptides of the present invention may be detected in certain tissues (e.g., tissues expressing polypeptides and/or polynucleotides of the present invention, for example, normal excretory system or diseased excretory system tissues, and/or those tissues/cells corresponding to the library source relating to a polynucleotide sequence of the invention as disclosed in column 7 of Table 1A, and/or cancerous and/or wounded tissues) or bodily fluids (e.g., semen, lymph, vaginal pool, serum, plasma, urine, synovial fluid or spinal fluid) taken from an individual having such a disorder, relative to a “standard” gene expression level, i.e., the expression level in healthy tissue from an individual not having the disorder.

[0394] Thus, the invention provides a diagnostic method of a disorder, which involves: (a) assaying gene expression level in cells or body fluid of an individual; (b) comparing the gene expression level with a standard gene expression level, whereby an increase or decrease in the assayed gene expression level compared to the standard expression level is indicative of a disorder.

[0395] In the very least, the polynucleotides of the present invention can be used as molecular weight markers on Southern gels, as diagnostic probes for the presence of a specific mRNA in a particular cell type, as a probe to “subtract-out” known sequences in the process of discovering novel polynucleotides, for selecting and making oligomers for attachment to a “gene chip” or other support, to raise anti-DNA antibodies using DNA immunization techniques, and as an antigen to elicit an immune response.

[0396] Uses of the Polypeptides

[0397] Each of the polypeptides identified herein can be used in numerous ways. The following description should be considered exemplary and utilizes known techniques.

[0398] Polypeptides and antibodies directed to polypeptides of the present invention are useful to provide immunological probes for differential identification of the tissue(s) (e.g., immunohistochemistry assays such as, for example, ABC immunoperoxidase (Hsu et al., J. Histochem. Cytochem. 29:577-580 (1981)) or cell type(s) (e.g., immunocytochemistry assays).

[0399] Antibodies can be used to assay levels of polypeptides encoded by polynucleotides of the invention in a biological sample using classical immunohistological methods known to those of skill in the art (see, e.g., Jalkanen, et al., J. Cell. Biol. 101:976-985 (1985); Jalkanen, et al., J. Cell. Biol. 105:3087-3096 (1987)). Other antibody-based methods useful for detecting protein gene expression include immunoassays, such as the enzyme linked immunosorbent assay (ELISA) and the radioimmunoassay (RIA). Suitable antibody assay labels are known in the art and include enzyme labels, such as, glucose oxidase; radioisotopes, such as iodine (¹³¹I, ¹²⁵I, ¹²³I, ¹²¹I), carbon (¹⁴C), sulfur (³⁵S), tritium (³H), indium (^{115m}In, ^{113m}In, ¹¹²In, ¹¹¹In), and technetium (⁹⁹Tc, ^{99m}Tc), thallium (²⁰¹Ti), gallium (⁶⁸Ga, ⁶⁷Ga), palladium (¹⁰³ Pd), molybdenum (⁹⁹Mo), xenon (¹³³Xe), fluorine (¹⁸F), ¹⁵³Sm, ¹⁷⁷Lu, ¹⁵⁹Gd, ¹⁴⁹Pm, ¹⁴⁰La, ¹⁷⁵Yb, ¹⁶⁶Ho, ⁹⁰Y, ⁴⁷Sc, ¹⁸⁶Re, ¹⁸⁸Re, ¹⁴²Pr, ¹⁰⁵Rh, ⁹⁷Ru; luminescent labels, such as luminol; and fluorescent labels, such as fluorescein and rhodamine, and biotin.

[0400] In addition to assaying levels of polypeptide of the present invention in a biological sample, proteins can also be detected in vivo by imaging. Antibody labels or markers for in vivo imaging of protein include those detectable by X-radiography, NMR or ESR. For X-radiography, suitable labels include radioisotopes such as barium or cesium, which emit detectable radiation but are not overtly harmful to the subject. Suitable markers for NMR and ESR include those with a detectable characteristic spin, such as deuterium, which may be incorporated into the antibody by labeling of nutrients for the relevant hybridoma.

[0401] An excretory system antigen-specific antibody or antibody fragment which has been labeled with an appropriate detectable imaging moiety, such as a radioisotope (for example, ¹³¹I, ¹¹²In ^{99m}Tc, (¹³¹I, ¹²⁵I, ¹²³I, ¹²¹I), carbon (¹⁴C), sulfur (³⁵S), tritium (³H), indium (^{115m}In, ^{113m}In, ¹¹²In, ¹¹¹In), and technetium (⁹⁹Tc, ^{99m}Tc), thallium (²⁰¹Ti), gallium (⁶⁸Ga, ⁶⁷Ga), palladium (¹⁰³Pd), molybdenum (⁹⁹Mo), xenon (¹³³Xe), fluorine (¹⁸F, ¹⁵³Sm, ¹⁷⁷Lu, ¹⁵⁹Gd, ¹⁴⁹Pm, ¹⁴⁰La, ¹⁷⁵Yb, ¹⁶⁶Ho, ⁹⁰Y, ⁴⁷Sc, ¹⁸⁶Re, ¹⁸⁸Re, ¹⁴²Pr, ¹⁰⁵Rh, ⁹⁷Ru), a radio-opaque substance, or a material detectable by nuclear magnetic resonance, is introduced (for example, parenterally, subcutaneously or intraperitoneally) into the mammal to be examined for an excretory system disorder. It will be understood in the art that the size of the subject and the imaging system used will determine the quantity of imaging moiety needed to produce diagnostic images. In the case of a radioisotope moiety, for a human subject, the quantity of radioactivity injected will normally range from about 5 to 20 millicuries of ^{99m}Tc. The labeled antibody or antibody fragment will then preferentially accumulate at the location of cells which express the polypeptide encoded by a polynucleotide of the invention. In vivo tumor imaging is described in S. W. Burchiel et al., “Immunopharmacokinetics of Radiolabeled Antibodies and Their Fragments” (Chapter 13 in Tumor Imaging: The Radiochemical Detection of Cancer, S. W. Burchiel and B. A. Rhodes, eds., Masson Publishing Inc. (1982)).

[0402] In one embodiment, the invention provides a method for the specific delivery of compositions of the invention to cells by administering polypeptides of the invention (e.g., polypeptides encoded by polynucleotides of the invention and/or antibodies) that are associated with heterologous polypeptides or nucleic acids. In one example, the invention provides a method for delivering a therapeutic protein into the targeted cell. In another example, the invention provides a method for delivering a single stranded nucleic acid (e.g., antisense or ribozymes) or double stranded nucleic acid (e.g., DNA that can integrate into the cell's genome or replicate episomally and that can be transcribed) into the targeted cell.

[0403] In another embodiment, the invention provides a method for the specific destruction of cells (e.g., the destruction of tumor cells) by administering polypeptides of the invention in association with toxins or cytotoxic prodrugs.

[0404] In a preferred embodiment, the invention provides a method for the specific destruction of excretory system cells (e.g., aberrant excretory system cells, excretory system neoplasm) by administering polypeptides of the invention (e.g., polypeptides encoded by polynucleotides of the invention and/or antibodies) in association with toxins or cytotoxic prodrugs. In another preferred embodiment the invention provides a method for the specific destruction of tissues/cells corresponding to the library source relating to a polynucleotide sequence of the invention as disclosed in column 7 of Table 1A by administering polypeptides of the invention in association with toxins or cytotoxic prodrugs.

[0405] By “toxin” is meant one or more compounds that bind and activate endogenous cytotoxic effector systems, radioisotopes, holotoxins, modified toxins, catalytic subunits of toxins, or any molecules or enzymes not normally present in or on the surface of a cell that under defined conditions cause the cell's death. Toxins that may be used according to the methods of the invention include, but are not limited to, radioisotopes known in the art, compounds such as, for example, antibodies (or complement fixing containing portions thereof) that bind an inherent or induced endogenous cytotoxic effector system, thymidine kinase, endonuclease, RNAse, alpha toxin, ricin, abrin, Pseudomonas exotoxin A, diphtheria toxin, saporin, momordin, gelonin, pokeweed antiviral protein, alpha-sarcin and cholera toxin. “Toxin” also includes a cytostatic or cytocidal agent, a therapeutic agent or a radioactive metal ion, e.g., alpha-emitters such as, for example, ²¹³Bi, or other radioisotopes such as, for example, ¹⁰³Pd, ¹³³Xe, ¹³¹I, ¹¹¹In, ⁶⁸Ge, ⁵⁷Co, ⁶⁵Zn, ⁸⁵Sr, ³²P, ³⁵S, ⁹⁰Y, ¹⁵³Sm, ¹⁵³Gd, ¹⁶⁹Yb, ⁵¹Cr, ⁵⁴Mn, ⁷⁵Se, ¹¹³Sn, ⁹⁰Yttrium, ¹¹⁷Tin, ¹⁸⁶Rhenium, ¹⁶⁶Holmium, and ¹⁸⁸Rhenium; luminescent labels, such as luminol; and fluorescent labels, such as fluorescein and rhodamine, and biotin.

[0406] In a specific embodiment, the invention provides a method for the specific destruction of cells (e.g., the destruction of tumor cells) by administering polypeptides of the invention or antibodies of the invention in association with the radioisotope ⁹⁰Y. In another specific embodiment, the invention provides a method for the specific destruction of cells (e.g., the destruction of tumor cells) by administering polypeptides of the invention or antibodies of the invention in association with the radioisotope ¹¹¹In. In a further specific embodiment, the invention provides a method for the specific destruction of cells (e.g., the destruction of tumor cells) by administering polypeptides of the invention or antibodies of the invention in association with the radioisotope ¹³¹I.

[0407] Techniques known in the art may be applied to label polypeptides of the invention (including antibodies). Such techniques include, but are not limited to, the use of bifunctional conjugating agents (see e.g., U.S. Pat. Nos. 5,756,065; 5,714,631; 5,696,239; 5,652,361; 5,505,931; 5,489,425; 5,435,990; 5,428,139; 5,342,604; 5,274,119; 4,994,560; and 5,808,003; the contents of each of which are hereby incorporated by reference in its entirety).

[0408] Thus, the invention provides a diagnostic method of a disorder, which involves (a) assaying the expression level of a polypeptide of the present invention in cells or body fluid of an individual; and (b) comparing the assayed polypeptide expression level with a standard polypeptide expression level, whereby an increase or decrease in the assayed polypeptide expression level compared to the standard expression level is indicative of a disorder. With respect to cancer, the presence of a relatively high amount of transcript in biopsied tissue from an individual may indicate a predisposition for the development of the disease, or may provide a means for detecting the disease prior to the appearance of actual clinical symptoms. A more definitive diagnosis of this type may allow health professionals to employ preventative measures or aggressive treatment earlier thereby preventing the development or further progression of the cancer.

[0409] Moreover, polypeptides of the present invention can be used to treat or prevent diseases or conditions of the excretory system such as, for example, renal disorders (e.g., kidney failure, nephritis, blood vessel disorders of kidney, metabolic and congenital kidney disorders, urinary disorders of the kidney, autoimmune disorders, sclerosis and necrosis, and electrolyte imbalance, and kidney cancer), bladder disorders (e.g, urinary tract infection, bladder obstruction, urination disorders, and bladder cancer), urether disorders (e.g., obstruction of the ureter and ureter cancer), urethra disorders (e.g., obstruction of the urethra and urethra cancers) and/or those disorders as discribed under “Urinary System Disorders” below. In preferred embodiments, polynucleotides expressed in a particular tissue type (see, e.g., Table 1A, column 7) are used to diagnose, detect, prevent, treat and/or prognose disorders associated with the tissue type. For example, patients can be administered a polypeptide of the present invention in an effort to replace absent or decreased levels of the polypeptide (e.g., insulin), to supplement absent or decreased levels of a different polypeptide (e.g., hemoglobin S for hemoglobin B, SOD, catalase, DNA repair proteins), to inhibit the activity of a polypeptide (e.g., an oncogene or tumor supressor), to activate the activity of a polypeptide (e.g., by binding to a receptor), to reduce the activity of a membrane bound receptor by competing with it for free ligand (e.g., soluble TNF receptors used in reducing inflammation), or to bring about a desired response (e.g., blood vessel growth inhibition, enhancement of the immune response to proliferative cells or tissues).

[0410] Similarly, antibodies directed to a polypeptide of the present invention can also be used to treat disease (as described supra, and elsewhere herein). For example, administration of an antibody directed to a polypeptide of the present invention can bind, and/or neutralize the polypeptide, and/or reduce overproduction of the polypeptide. Similarly, administration of an antibody can activate the polypeptide, such as by binding to a polypeptide bound to a membrane (receptor).

[0411] At the very least, the polypeptides of the present invention can be used as molecular weight markers on SDS-PAGE gels or on molecular sieve gel filtration columns using methods well known to those of skill in the art. Polypeptides can also be used to raise antibodies, which in turn are used to measure protein expression from a recombinant cell, as a way of assessing transformation of the host cell. Moreover, the polypeptides of the present invention can be used to test the biological activities described herein.

[0412] Diagnostic Asssays

[0413] The compounds of the present invention are useful for diagnosis, treatment, prevention and/or prognosis of various excretory system related disorders in mammals, preferably humans. Such disorders include, but are not limited to, renal disorders (e.g., kidney failure, nephritis, blood vessel disorders of kidney, metabolic and congenital kidney disorders, urinary disorders of the kidney, autoimmune disorders, sclerosis and necrosis, and electrolyte imbalance, and kidney cancer), bladder disorders (e.g, urinary tract infection, bladder obstruction, urination disorders, and bladder cancer), urether disorders (e.g., obstruction of the ureter and ureter cancer), urethra disorders (e.g., obstruction of the urethra and urethra cancers) and/or those disorders as discribed under “Urinary System Disorders” below. In preferred embodiments, polynucleotides expressed in a particular tissue type (see, e.g., Table 1A, column 7) are used to diagnose, detect, prevent, treat and/or prognose disorders associated with the tissue type.

[0414] Excretory system antigens are expressed in the excretory system, with an increased expression level in excretory system tissues. For a number of excretory system-related disorders, substantially altered (increased or decreased) levels of excretory system antigen gene expression can be detected in excretory system tissue or other cells or bodily fluids (e.g., sera, plasma, urine, semen, synovial fluid or spinal fluid) taken from an individual having such a disorder, relative to a “standard” excretory system antigen gene expression level, that is, the excretory system antigen expression level in excretory system tissues or bodily fluids from an individual not having the excretory system disorder. Thus, the invention provides a diagnostic method useful during diagnosis of an excretory system disorder, which involves measuring the expression level of the gene encoding the excretory system associated polypeptide in excretory system tissue or other cells or body fluid from an individual and comparing the measured gene expression level with a standard excretory system antigens gene expression level, whereby an increase or decrease in the gene expression level(s) compared to the standard is indicative of an excretory system disorder.

[0415] In specific embodiments, the invention provides a diagnostic method useful during diagnosis of a disorder of a normal or diseased tissue/cell source corresponding to column 7 of Table 1A, which involves measuring the expression level of the coding sequence of a polynucleotide sequence associated with this tissue/cell source as disclosed in Table 1A in the tissue/cell source or other cells or body fluid from an individual and comparing the expression level of the coding sequence with a standard expression level of the coding sequence of a polynucleotide sequence, whereby an increase or decrease in the gene expression level(s) compared to the standard is indicative of a disorder of a normal or diseased tissue/cell source corresponding to column 7 of Table 1A.

[0416] In particular, it is believed that certain tissues in mammals with cancer of cells or tissue of the excretory system express significantly enhanced or reduced levels of normal or altered excretory system antigen expression and mRNA encoding the excretory system associated polypeptide when compared to a corresponding “standard” level. Further, it is believed that enhanced or depressed levels of the excretory system associated polypeptide can be detected in certain body fluids (e.g., sera, plasma, urine, and spinal fluid) or cells or tissue from mammals with such a cancer when compared to sera from mammals of the same species not having the cancer.

[0417] For example, as disclosed herein, excretory system associated polypeptides of the invention are expressed in excretory system tissues. Accordingly, polynucleotides of the invention (e.g., polynucleotide sequences complementary to all or a portion of an excretory system antigen mRNA nucleotide sequence of SEQ ID NO: X, nucleotide sequence encoding SEQ ID NO: Y, nucleotide sequence encoding a polypeptide encoded by SEQ ID NO: X and/or a nucleotide sequence delineated by columns 8 and 9 of Table 2) and antibodies (and antibody fragments) directed against the polypeptides of the invention may be used to quantitate or qualitate concentrations of cells of the excretory system expressing excretory system antigens, preferrably on their cell surfaces. These polynucleotides and antibodies additionally have diagnostic applications in detecting abnormalities in the level of excretory system antigens gene expression, or abnormalities in the structure and/or temporal, tissue, cellular, or subcellular location of excretory system antigens. These diagnostic assays may be performed in vivo or in vitro, such as, for example, on blood samples, biopsy tissue or autopsy tissue. In specific embodiments, polynucleotides and antibodies of the invention are used to quantitate or qualitate tissues/cells corresponding to the library source disclosed in column 7 of Table 1A expressing the corresponding excretory system sequence disclosed in the same row of Table 1A, preferrably on their cell surface.

[0418] Thus, the invention provides a diagnostic method useful during diagnosis of an excretory system disorder, including cancers, which involves measuring the expression level of the gene encoding the excretory system antigen polypeptide in excretory system tissue or other cells or body fluid from an individual and comparing the measured gene expression level with a standard excretory system antigen gene expression level, whereby an increase or decrease in the gene expression level compared to the standard is indicative of an excretory system disorder. In specific embodiments, polynucleotides and antibodies of the invention are used to quantitate or qualitate tissues/cells corresponding to the library source disclosed in column 7 of Table 1A expressing the corresponding excretory system sequence disclosed in the same row of Table 1A, preferrably on their cell surface.

[0419] Where a diagnosis of a disorder in the excretory system, including diagnosis of a tumor, has already been made according to conventional methods, the present invention is useful as a prognostic indicator, whereby patients exhibiting enhanced or depressed excretory system antigen gene expression will experience a worse clinical outcome relative to patients expressing the gene at a level nearer the standard level.

[0420] By “assaying the expression level of the gene encoding the excretory system associated polypeptide” is intended qualitatively or quantitatively measuring or estimating the level of the excretory system antigen polypeptide or the level of the mRNA encoding the excretory system antigen polypeptide in a first biological sample either directly (e.g., by determining or estimating absolute protein level or mRNA level) or relatively (e.g., by comparing to the excretory system associated polypeptide level or mRNA level in a second biological sample). Preferably, the excretory system antigen polypeptide expression level or mRNA level in the first biological sample is measured or estimated and compared to a standard excretory system antigen polypeptide level or mRNA level, the standard being taken from a second biological sample obtained from an individual not having the disorder or being determined by averaging levels from a population of individuals not having a disorder of the excretory system. As will be appreciated in the art, once a standard excretory system antigen polypeptide level or mRNA level is known, it can be used repeatedly as a standard for comparison.

[0421] By “biological sample” is intended any biological sample obtained from an individual, cell line, tissue culture, or other source containing excretory system antigen polypeptides (including portions thereof) or mRNA. As indicated, biological samples include body fluids (such as sera, plasma, urine, synovial fluid and spinal fluid) which contain cells expressing excretory system antigen polypeptides, excretory system tissue, and other tissue sources found to express the full length or fragments thereof of an excretory system antigen. Methods for obtaining tissue biopsies and body fluids from mammals are well known in the art. Where the biological sample is to include mRNA, a tissue biopsy is the preferred source.

[0422] Total cellular RNA can be isolated from a biological sample using any suitable technique such as the single-step guanidinium-thiocyanate-phenol-chloroform method described in Chomczynski and Sacchi, Anal. Biochem. 162:156-159 (1987). Levels of mRNA encoding the excretory system antigen polypeptides are then assayed using any appropriate method. These include Northern blot analysis, SI nuclease mapping, the polymerase chain reaction (PCR), reverse transcription in combination with the polymerase chain reaction (RT-PCR), and reverse transcription in combination with the ligase chain reaction (RT-LCR).

[0423] The present invention also relates to diagnostic assays such as quantitative and diagnostic assays for detecting levels of excretory system antigen polypeptides, in a biological sample (e.g., cells and tissues), including determination of normal and abnormal levels of polypeptides. Thus, for instance, a diagnostic assay in accordance with the invention for detecting over-expression of excretory system antigens compared to normal control tissue samples may be used to detect the presence of tumors. Assay techniques that can be used to determine levels of a polypeptide, such as an excretory system antigen polypeptide of the present invention in a sample derived from a host are well-known to those of skill in the art. Such assay methods include radioimmunoassays, competitive-binding assays, Western Blot analysis and ELISA assays. Assaying excretory system antigen polypeptide levels in a biological sample can occur using any art-known method.

[0424] Assaying excretory system antigen polypeptide levels in a biological sample can occur using antibody-based techniques. For example, excretory system antigen polypeptide expression in tissues can be studied with classical immunohistological methods (Jalkanen et al., J. Cell. Biol. 101:976-985 (1985); Jalkanen, M., et al., J. Cell. Biol. 105:3087-3096 (1987)). Other antibody-based methods useful for detecting excretory system antigen polypeptide gene expression include immunoassays, such as the enzyme linked immunosorbent assay (ELISA) and the radioimmunoassay (RIA). Suitable antibody assay labels are known in the art and include enzyme labels, such as, glucose oxidase, and radioisotopes, such as iodine (¹²⁵I, ¹²¹I), carbon (¹⁴C), sulfur (³⁵S), tritium (³H), indium (¹¹² In), and technetium (^{99m}Tc), and fluorescent labels, such as fluorescein and rhodamine, and biotin.

[0425] The tissue or cell type to be analyzed will generally include those, which are known, or suspected, to express the excretory system antigen gene (such as, for example, cells of the excretory system or cancer or excretory system tissues). The protein isolation methods employed herein may, for example, be such as those described in Harlow and Lane (Harlow, E. and Lane, D., 1988, “Antibodies: A Laboratory Manual”, Cold Spring Harbor Laboratory Press, Cold Spring Harbor, N.Y.), which is incorporated herein by reference in its entirety. The isolated cells can be derived from cell culture or from a patient. The analysis of cells taken from culture may be a necessary step in the assessment of cells that could be used as part of a cell-based gene therapy technique or, alternatively, to test the effect of compounds on the expression of the excretory system antigen gene.

[0426] For example, antibodies, or fragments of antibodies, such as those described herein, may be used to quantitatively or qualitatively detect the presence of excretory system antigen gene products or conserved variants or peptide fragments thereof. This can be accomplished, for example, by immunofluorescence techniques employing a fluorescently labeled antibody coupled with light microscopic, flow cytometric, or fluorimetric detection.

[0427] In a preferred embodiment, antibodies, or fragments of antibodies directed to any one or all of the predicted epitope domains of the excretory system antigen polypeptides (Shown in Table 1A, column 6) may be used to quantitatively or qualitatively detect the presence of excretory system antigen gene products or conserved variants or peptide fragments thereof. This can be accomplished, for example, by immunofluorescence techniques employing a fluorescently labeled antibody coupled with light microscopic, flow cytometric, or fluorimetric detection.

[0428] In an additional preferred embodiment, antibodies, or fragments of antibodies directed to a conformational epitope of an excretory system antigen may be used to quantitatively or qualitatively detect the presence of excretory system antigen gene products or conserved variants or peptide fragments thereof. This can be accomplished, for example, by immunofluorescence techniques employing a fluorescently labeled antibody coupled with light microscopic, flow cytometric, or fluorimetric detection.

[0429] The antibodies (or fragments thereof), and/or excretory system antigen polypeptides of the present invention may, additionally, be employed histologically, as in immunofluorescence, immunoelectron microscopy or non-immunological assays, for in situ detection of excretory system antigen gene products or conserved variants or peptide fragments thereof. In situ detection may be accomplished by removing a histological specimen from a patient, and applying thereto a labeled antibody or excretory system antigen polypeptide of the present invention. The antibody (or fragment thereof) or excretory system antigen polypeptide is preferably applied by overlaying the labeled antibody (or fragment) onto a biological sample. Through the use of such a procedure, it is possible to determine not only the presence of the excretory system antigen gene product, or conserved variants or peptide fragments, or excretory system antigen polypeptide binding, but also its distribution in the examined tissue. Using the present invention, those of ordinary skill will readily perceive that any of a wide variety of histological methods (such as staining procedures) can be modified in order to achieve such in situ detection.

[0430] Immunoassays and non-immunoassays for excretory system antigen gene products or conserved variants or peptide fragments thereof will typically comprise incubating a sample, such as a biological fluid, a tissue extract, freshly harvested cells, or lysates of cells which have been incubated in cell culture, in the presence of a detectably labeled antibody capable of binding excretory system antigen gene products or conserved variants or peptide fragments thereof, and detecting the bound antibody by any of a number of techniques well-known in the art.

[0431] The biological sample may be brought in contact with and immobilized onto a solid phase support or carrier such as nitrocellulose, or other solid support which is capable of immobilizing cells, cell particles or soluble proteins. The support may then be washed with suitable buffers followed by treatment with the detectably labeled anti-excretory system antigen antibody or detectable excretory system antigen polypeptide. The solid phase support may then be washed with the buffer a second time to remove unbound antibody or polypeptide. Optionally the antibody is subsequently labeled. The amount of bound label on solid support may then be detected by conventional means.

[0432] By “solid phase support or carrier” is intended any support capable of binding an antigen or an antibody. Well-known supports or carriers include glass, polystyrene, polypropylene, polyethylene, dextran, nylon, amylases, natural and modified celluloses, polyacrylamides, gabbros, and magnetite. The nature of the carrier can be either soluble to some extent or insoluble for the purposes of the present invention. The support material may have virtually any possible structural configuration so long as the coupled molecule is capable of binding to an antigen or antibody. Thus, the support configuration may be spherical, as in a bead, or cylindrical, as in the inside surface of a test tube, or the external surface of a rod. Alternatively, the surface may be flat such as a sheet, test strip, etc. Preferred supports include polystyrene beads. Those skilled in the art will know many other suitable carriers for binding antibody or antigen, or will be able to ascertain the same by use of routine experimentation.

[0433] The binding activity of a given lot of anti-excretory system antigen antibody or excretory system antigen polypeptide may be determined according to well known methods. Those skilled in the art will be able to determine operative and optimal assay conditions for each determination by employing routine experimentation.

[0434] In addition to assaying excretory system antigen polypeptide levels or polynucleotide levels in a biological sample obtained from an individual, excretory system antigen polypeptide or polynucleotide can also be detected in vivo by imaging. For example, in one embodiment of the invention, excretory system antigen polypeptide and/or anti-excretory system antigen antibodies are used to image excretory system diseased cells, such as neoplasms. In another embodiment, excretory system antigen polynucleotides of the invention (e.g., polynucleotides complementary to all or a portion of excretory system antigen mRNA) and/or anti-excretory system antigen antibodies (e.g., antibodies directed to any one or a combination of the epitopes of excretory system antigens, antibodies directed to a conformational epitope of excretory system antigens, antibodies directed to the full length polypeptide expressed on the cell surface of a mammalian cell) are used to image diseased or neoplastic cells of the excretory system.

[0435] Antibody labels or markers for in vivo imaging of excretory system antigen polypeptides include those detectable by X-radiography, NMR, MRI, CAT-scans or ESR. For X-radiography, suitable labels include radioisotopes such as barium or cesium, which emit detectable radiation but are not overtly harmful to the subject. Suitable markers for NMR and ESR include those with a detectable characteristic spin, such as deuterium, which may be incorporated into the antibody by labeling of nutrients for the relevant hybridoma. Where in vivo imaging is used to detect enhanced levels of excretory system antigen polypeptides for diagnosis in humans, it may be preferable to use human antibodies or “humanized” chimeric monoclonal antibodies. Such antibodies can be produced using techniques described herein or otherwise known in the art. For example methods for producing chimeric antibodies are known in the art. See, for review, Morrison, Science 229:1202 (1985); Oi et al., BioTechniques 4:214 (1986); Cabilly et al., U.S. Pat. No. 4,816,567; Taniguchi et al., EP 171496; Morrison et al., EP 173494; Neuberger et al., WO 8601533; Robinson et al., WO 8702671; Boulianne et al., Nature 312:643 (1984); Neuberger et al., Nature 314:268 (1985).

[0436] Additionally, any excretory system antigen polypeptides whose presence can be detected, can be administered. For example, excretory system antigen polypeptides labeled with a radio-opaque or other appropriate compound can be administered and visualized in vivo, as discussed, above for labeled antibodies. Further such excretory system antigen polypeptides can be utilized for in vitro diagnostic procedures.

[0437] An excretory system antigen polypeptide-specific antibody or antibody fragment which has been labeled with an appropriate detectable imaging moiety, such as a radioisotope (for example, ¹³¹I, ¹¹²In, ^{99m}Tc), a radio-opaque substance, or a material detectable by nuclear magnetic resonance, is introduced (for example, parenterally, subcutaneously or intraperitoneally) into the mammal to be examined for an excretory system disorder. It will be understood in the art that the size of the subject and the imaging system used will determine the quantity of imaging moiety needed to produce diagnostic images. In the case of a radioisotope moiety, for a human subject, the quantity of radioactivity injected will normally range from about 5 to 20 millicuries of ^{99m}Tc. The labeled antibody or antibody fragment will then preferentially accumulate at the location of cells which contain excretory system antigen protein. In vivo tumor imaging is described in S. W. Burchiel et al., “Immunopharmacokinetics of Radiolabeled Antibodies and Their Fragments” (Chapter 13 in Tumor Imaging: The Radiochemical Detection of Cancer, S. W. Burchiel and B. A. Rhodes, eds., Masson Publishing Inc. (1982)).

[0438] With respect to antibodies, one of the ways in which the anti-excretory system antigen antibody can be detectably labeled is by linking the same to an enzyme and using the linked product in an enzyme immunoassay (EIA) (Voller, A., “The Enzyme Linked Immunosorbent Assay (ELISA)”, 1978, Diagnostic Horizons 2:1-7, Microbiological Associates Quarterly Publication, Walkersville, Md.); Voller et al., J. Clin. Pathol. 31:507-520 (1978); Butler, J. E., Meth. Enzymol. 73:482-523 (1981); Maggio, E. (ed.), 1980, Enzyme Immunoassay, CRC Press, Boca Raton, Fla.; Ishikawa, E. et al., (eds.), 1981, Enzyme Immunoassay, Kgaku Shoin, Tokyo). The enzyme which is bound to the antibody will react with an appropriate substrate, preferably a chromogenic substrate, in such a manner as to produce a chemical moiety which can be detected, for example, by spectrophotometric, fluorimetric or by visual means. Enzymes which can be used to detectably label the antibody include, but are not limited to, malate dehydrogenase, staphylococcal nuclease, delta-5-steroid isomerase, yeast alcohol dehydrogenase, alpha-glycerophosphate, dehydrogenase, triose phosphate isomerase, horseradish peroxidase, alkaline phosphatase, asparaginase, glucose oxidase, beta-galactosidase, ribonuclease, urease, catalase, glucose-6-phosphate dehydrogenase, glucoamylase and acetylcholinesterase. Additionally, the detection can be accomplished by colorimetric methods which employ a chromogenic substrate for the enzyme. Detection may also be accomplished by visual comparison of the extent of enzymatic reaction of a substrate in comparison with similarly prepared standards.

[0439] Detection may also be accomplished using any of a variety of other immunoassays. For example, by radioactively labeling the antibodies or antibody fragments, it is possible to detect excretory system antigens through the use of a radioimmunoassay (RIA) (see, for example, Weintraub, B., Principles of Radioimmunoassays, Seventh Training Course on Radioligand Assay Techniques, The Endocrine Society, March, 1986, which is incorporated by reference herein). The radioactive isotope can be detected by means including, but not limited to, a gamma counter, a scintillation counter, or autoradiography.

[0440] It is also possible to label the antibody with a fluorescent compound. When the fluorescently labeled antibody is exposed to light of the proper wavelength, its presence can then be detected due to fluorescence. Among the most commonly used fluorescent labeling compounds are fluorescein isothiocyanate, rhodamine, phycoerythrin, phycocyanin, allophycocyanin, ophthaldehyde and fluorescamine.

[0441] The antibody can also be detectably labeled using fluorescence emitting metals such as ¹⁵²Eu, or others of the lanthanide series. These metals can be attached to the antibody using such metal chelating groups as diethylenetriaminepentacetic acid (DTPA) or ethylenediaminetetraacetic acid (EDTA).

[0442] The antibody also can be detectably labeled by coupling it to a chemiluminescent compound. The presence of the chemiluminescent-tagged antibody is then determined by detecting the presence of luminescence that arises during the course of a chemical reaction. Examples of particularly useful chemiluminescent labeling compounds are luminol, isoluminol, theromatic acridinium ester, imidazole, acridinium salt and oxalate ester.

[0443] Likewise, a bioluminescent compound may be used to label the antibody of the present invention. Bioluminescence is a type of chemiluminescence found in biological systems in, which a catalytic protein increases the efficiency of the chemiluminescent reaction. The presence of a bioluminescent protein is determined by detecting the presence of luminescence. Important bioluminescent compounds for purposes of labeling are luciferin, luciferase and aequorin.

[0444] Methods for Detecting Excretory System Disease, Including Cancer

[0445] In general, an excretory system disease or cancer may be detected in a patient based on the presence of one or more excretory system antigen proteins of the invention and/or polynucleotides encoding such proteins in a biological sample (for example, blood, sera, urine, and/or tumor biopsies) obtained from the patient. In other words, such proteins and/or polynucleotides may be used as markers to indicate the presence or absence of an excretory system disease or disorder, including cancer. Cancers that may be diagnosed, and/or prognosed using the compositions of the invention include but are not limited to, cancer of excretory system tissues. In addition, such proteins and/or polynucleotides may be useful for the detection of other diseases and cancers, including cancers of tissues/cells corresponding to the library source disclosed in column 7 of Table 1A expressing the corresponding excretory system sequence disclosed in the same row of Table 1A. The binding agents provided herein generally permit detection of the level of antigen that binds to the agent in the biological sample. Polynucleotide primers and probes may be used to detect the level of mRNA encoding excretory system antigen polypeptides, which is also indicative of the presence or absence of a excretory system disease or disorder, including cancer. In general, excretory system antigen polypeptides should be present at a level that is at least three fold higher in diseased tissue than in normal tissue.

[0446] There are a variety of assay formats known to those of ordinary skill in the art for using a binding agent to detect polypeptide markers in a sample. See, e.g., Harlow and Lane, supra. In general, the presence or absence of an excretory system disease in a patient may be determined by (a) contacting a biological sample obtained from a patient with a binding agent; (b) detecting in the sample a level of polypeptide that binds to the binding agent; and (c) comparing the level of polypeptide with a predetermined cut-off value.

[0447] In a preferred embodiment, the assay involves the use of binding agent immobilized on a solid support to bind to and remove the excretory system antigen polypeptide of the invention from the remainder of the sample. The bound polypeptide may then be detected using a detection reagent that contains a reporter group and specifically binds to the binding agent/polypeptide complex. Such detection reagents may comprise, for example, a binding agent that specifically binds to the polypeptide or an antibody or other agent that specifically binds to the binding agent, such as an anti-immunoglobulin, protein G, protein A or a lectin. Alternatively, a competitive assay may be utilized, in which a polypeptide is labeled with a reporter group and allowed to bind to the immobilized binding agent after incubation of the binding agent with the sample. The extent to which components of the sample inhibit the binding of the labeled polypeptide to the binding agent is indicative of the reactivity of the sample with the immobilized binding agent. Suitable polypeptides for use within such assays include excretory system antigen polypeptides and portions thereof, or antibodies, to which the binding agent binds, as described above.

[0448] The solid support may be any material known to those of skill in the art to which excretory system antigen polypeptides of the invention may be attached. For example, the solid support may be a test well in a microtiter plate or a nitrocellulose or other suitable membrane. Alternatively, the support may be a bead or disc, such as glass fiberglass, latex or a plastic material such as polystyrene or polyvinylchloride. The support may also be a magnetic particle or a fiber optic sensor, such as those disclosed, for example, in U.S. Pat. No. 5,359,681. The binding agent may be immobilized on the solid support using a variety of techniques known to those of skill in the art, which are amply described in the patent and scientific literature. In the context of the present invention, the term “immobilization” refers to both noncovalent association, such as adsorption, and covalent attachment (which may be a direct linkage between the agent and functional groups on the support or may be a linkage by way of a cross-linking agent). Immobilization by adsorption to a well in a microtiter plate or to a membrane is preferred. In such cases, adsorption may be achieved by contacting the binding agent, in a suitable buffer, with the solid support for the suitable amount of time. The contact time varies with temperature, but is typically between about 1 hour and about 1 day. In general, contacting a well of plastic microtiter plate (such as polystyrene or polyvinylchloride) with an amount of binding agent ranging from about 10 ng to about 10 ug, and preferably about 100 ng to about 1 ug, is sufficient to immobilize an adequate amount of binding agent.

[0449] Covalent attachment of binding agent to a solid support may generally be achieved by first reacting the support with a bifunctional reagent that will react with both the support and a functional group, such as a hydroxyl or amino group, on the binding agent. For example, the binding agent may be covalently attached to supports having an appropriate polymer coating using benzoquinone or by condensation of an aldehyde group on the support with an amine and an active hydrogen on the binding partner (see, e.g., Pierce Immunotechnology Catalog and Handbook, 1991, at A12-A13).

[0450] Gene Therapy Methods

[0451] Also encompassed by the present invention are gene therapy methods for treating or preventing disorders, diseases and conditions. The gene therapy methods relate to the introduction of nucleic acid (DNA, RNA and antisense DNA or RNA) sequences into an animal to achieve expression of an excretory system antigen of the present invention. This method requires a polynucleotide, which codes for a polypeptide of the present invention operatively linked to a promoter and any other genetic elements necessary for the expression of the polypeptide by the target tissue. Such gene therapy and delivery techniques are known in the art, see, for example, WO90/11092, which is herein incorporated by reference.

[0452] Thus, for example, cells from a patient may be engineered with a polynucleotide (DNA or RNA) comprising a promoter operably linked to a polynucleotide of the present invention ex vivo, with the engineered cells then being provided to a patient to be treated with the polypeptide of the present invention. Such methods are well-known in the art. For example, see Belldegrun, A., et al., J. Natl. Cancer Inst. 85: 207-216 (1993); Ferrantini, M. et al., Cancer Research 53: 1107-1112 (1993); Ferrantini, M. et al., J. Immunology 153: 4604-4615 (1994); Kaido, T., et al., Int. J. Cancer 60: 221-229 (1995); Ogura, H., et al., Cancer Research 50: 5102-5106 (1990); Santodonato, L., et al., Human Gene Therapy 7:1-10 (1996); Santodonato, L., et al., Gene Therapy 4:1246-1255 (1997); and Zhang, J. -F. et al., Cancer Gene Therapy 3: 31-38 (1996)), which are herein incorporated by reference. In one embodiment, the cells which are engineered are arterial cells. The arterial cells may be reintroduced into the patient through direct injection to the artery, the tissues surrounding the artery, or through catheter injection.

[0453] As discussed in more detail below, the polynucleotide constructs can be delivered by any method that delivers injectable materials to the cells of an animal, such as, injection into the interstitial space of tissues (heart, muscle, skin, lung, liver, and the like). The polynucleotide constructs may be delivered in a pharmaceutically acceptable liquid or aqueous carrier.

[0454] In one embodiment, the polynucleotide of the present invention is delivered as a naked polynucleotide. The term “naked” polynucleotide, DNA or RNA refers to sequences that are free from any delivery vehicle that acts to assist, promote or facilitate entry into the cell, including viral sequences, viral particles, liposome formulations, lipofectin or precipitating agents and the like. However, the polynucleotide of the present invention can also be delivered in liposome formulations and lipofectin formulations and the like can be prepared by methods well known to those skilled in the art. Such methods are described, for example, in U.S. Pat. Nos. 5,593,972, 5,589,466, and 5,580,859, which are herein incorporated by reference.

[0455] The polynucleotide vector constructs used in the gene therapy method are preferably constructs that will not integrate into the host genome nor will they contain sequences that allow for replication. Appropriate vectors include pWLNEO, pSV2CAT, pOG44, pXT1 and pSG available from Stratagene; pSVK3, pBPV, pMSG and pSVL available from Pharmacia; and pEF1/V5, pcDNA3.1, and pRc/CMV2 available from Invitrogen. Other suitable vectors will be readily apparent to the skilled artisan.

[0456] Any strong promoter known to those skilled in the art can be used for driving the expression of the polynucleotide sequence. Suitable promoters include adenoviral promoters, such as the adenoviral major late promoter; or heterologous promoters, such as the cytomegalovirus (CMV) promoter; the respiratory syncytial virus (RSV) promoter; inducible promoters, such as the MMT promoter, the metallothionein promoter; heat shock promoters; the albumin promoter; the ApoAI promoter; human globin promoters; viral thymidine kinase promoters, such as the Herpes Simplex thymidine kinase promoter; retroviral LTRs; the b-actin promoter; and human growth hormone promoters. The promoter also may be the native promoter for the polynucleotide of the present invention.

[0457] Unlike other gene therapy techniques, one major advantage of introducing naked nucleic acid sequences into target cells is the transitory nature of the polynucleotide synthesis in the cells. Studies have shown that non-replicating DNA sequences can be introduced into cells to provide production of the desired polypeptide for periods of up to six months.

[0458] The polynucleotide construct can be delivered to the interstitial space of tissues within the animal, including of muscle, skin, brain, lung, liver, spleen, bone marrow, thymus, heart, lymph, blood, bone, cartilage, pancreas, kidney, gall bladder, stomach, intestine, testis, ovary, uterus, rectum, nervous system, eye, gland, and connective tissue. Interstitial space of the tissues comprises the intercellular, fluid, mucopolysaccharide matrix among the reticular fibers of organ tissues, elastic fibers in the walls of vessels or chambers, collagen fibers of fibrous tissues, or that same matrix within connective tissue ensheathing muscle cells or in the lacunae of bone. It is similarly the space occupied by the plasma of the circulation and the lymph fluid of the lymphatic channels. Delivery to the interstitial space of muscle tissue is preferred for the reasons discussed below. They may be conveniently delivered by injection into the tissues comprising these cells. They are preferably delivered to and expressed in persistent, non-dividing cells which are differentiated, although delivery and expression may be achieved in non-differentiated or less completely differentiated cells, such as, for example, stem cells of blood or skin fibroblasts. In vivo muscle cells are particularly competent in their ability to take up and express polynucleotides.

[0459] For the naked nucleic acid sequence injection, an effective dosage amount of DNA or RNA will be in the range of from about 0.05 mg/kg body weight to about 50 mg/kg body weight. Preferably the dosage will be from about 0.005 mg/kg to about 20 mg/kg and more preferably from about 0.05 mg/kg to about 5 mg/kg. Of course, as the artisan of ordinary skill will appreciate, this dosage will vary according to the tissue site of injection. The appropriate and effective dosage of nucleic acid sequence can readily be determined by those of ordinary skill in the art and may depend on the condition being treated and the route of administration.

[0460] The preferred route of administration is by the parenteral route of injection into the interstitial space of tissues. However, other parenteral routes may also be used, such as, inhalation of an aerosol formulation particularly for delivery to lungs or bronchial tissues, throat or mucous membranes of the nose. In addition, naked DNA constructs can be delivered to arteries during angioplasty by the catheter used in the procedure.

[0461] The naked polynucleotides are delivered by any method known in the art, including, but not limited to, direct needle injection at the delivery site, intravenous injection, topical administration, catheter infusion, and so-called “gene guns”. These delivery methods are known in the art.

[0462] The constructs may also be delivered with delivery vehicles such as viral sequences, viral particles, liposome formulations, lipofectin, precipitating agents, etc. Such methods of delivery are known in the art.

[0463] In certain embodiments, the polynucleotide constructs are complexed in a liposome preparation. Liposomal preparations for use in the instant invention include cationic (positively charged), anionic (negatively charged) and neutral preparations. However, cationic liposomes are particularly preferred because a tight charge complex can be formed between the cationic liposome and the polyanionic nucleic acid. Cationic liposomes have been shown to mediate intracellular delivery of plasmid DNA (Felgner et al., Proc. Natl. Acad. Sci. USA (1987) 84:7413-7416, which is herein incorporated by reference); mRNA (Malone et al., Proc. Natl. Acad. Sci. USA (1989) 86:6077-6081, which is herein incorporated by reference); and purified transcription factors (Debs et al., J. Biol. Chem. (1990) 265:10189-10192, which is herein incorporated by reference), in functional form.

[0464] Cationic liposomes are readily available. For example, N[1-2,3-dioleyloxy)propyl]-N,N,N-triethylammonium (DOTMA) liposomes are particularly useful and are available under the trademark Lipofectin, from GIBCO BRL, Grand Island, N.Y., (see, also, Felgner et al., Proc. Natl Acad. Sci. USA (1987) 84:7413-7416, which is herein incorporated by reference). Other commercially available liposomes include transfectace (DDAB/DOPE) and DOTAP/DOPE (Boehringer).

[0465] Other cationic liposomes can be prepared from readily available materials using techniques well known in the art. See, e.g. PCT Publication No. WO 90/11092 (which is herein incorporated by reference) for a description of the synthesis of DOTAP (1,2-bis(oleoyloxy)-3-(trimethylammonio)propane) liposomes. Preparation of DOTMA liposomes is explained in the literature, see, e.g., P. Felgner et al., Proc. Natl. Acad. Sci. USA 84:7413-7417, which is herein incorporated by reference. Similar methods can be used to prepare liposomes from other cationic lipid materials.

[0466] Similarly, anionic and neutral liposomes are readily available, such as from Avanti Polar Lipids (Birmingham, Ala.), or can be easily prepared using readily available materials. Such materials include phosphatidyl choline, cholesterol, phosphatidyl ethanolamine, dioleoylphosphatidyl choline (DOPC), dioleoylphosphatidyl glycerol (DOPG), dioleoylphoshatidyl ethanolamine (DOPE), among others. These materials can also be mixed with the DOTMA and DOTAP starting materials in appropriate ratios. Methods for making liposomes using these materials are well known in the art.

[0467] For example, commercially dioleoylphosphatidyl choline (DOPC), dioleoylphosphatidyl glycerol (DOPG), and dioleoylphosphatidyl ethanolamine (DOPE) can be used in various combinations to make conventional liposomes, with or without the addition of cholesterol. Thus, for example, DOPG/DOPC vesicles can be prepared by drying 50 mg each of DOPG and DOPC under a stream of nitrogen gas into a sonication vial. The sample is placed under a vacuum pump overnight and is hydrated the following day with deionized water. The sample is then sonicated for 2 hours in a capped vial, using a Heat Systems model 350 sonicator equipped with an inverted cup (bath type) probe at the maximum setting while the bath is circulated at 15EC. Alternatively, negatively charged vesicles can be prepared without sonication to produce multilamellar vesicles or by extrusion through nucleopore membranes to produce unilamellar vesicles of discrete size. Other methods are known and available to those of skill in the art.

[0468] The liposomes can comprise multilamellar vesicles (MLVs), small unilamellar vesicles (SUVs), or large unilamellar vesicles (LUVs), with SUVs being preferred. The various liposome-nucleic acid complexes are prepared using methods well known in the art. See, e.g., Straubinger et al., Methods of Immunology (1983), 101:512-527, which is herein incorporated by reference. For example, MLVs containing nucleic acid can be prepared by depositing a thin film of phospholipid on the walls of a glass tube and subsequently hydrating with a solution of the material to be encapsulated. SUVs are prepared by extended sonication of MLVs to produce a homogeneous population of unilamellar liposomes. The material to be entrapped is added to a suspension of preformed MLVs and then sonicated. When using liposomes containing cationic lipids, the dried lipid film is resuspended in an appropriate solution such as sterile water or an isotonic buffer solution such as 10 mM Tris/NaCl, sonicated, and then the preformed liposomes are mixed directly with the DNA. The liposome and DNA form a very stable complex due to binding of the positively charged liposomes to the cationic DNA. SUVs find use with small nucleic acid fragments. LUVs are prepared by a number of methods, well known in the art. Commonly used methods include Ca²⁺-EDTA chelation (Papahadjopoulos et al., Biochim. Biophys. Acta (1975) 394:483; Wilson et al., Cell 17:77 (1979); ether injection (Deamer, D. and Bangham, A., Biochim. Biophys. Acta 443:629 (1976); Ostro et al., Biochem. Biophys. Res. Commun. 76:836 (1977); Fraley et al., Proc. Natl. Acad. Sci. USA 76:3348 (1979)); detergent dialysis (Enoch, H. and Strittmatter, P., Proc. Natl. Acad. Sci. USA 76:145 (1979)); and reverse-phase evaporation (REV) (Fraley et al., J. Biol. Chem. 255:10431 (1980); Szoka et al., Proc. Natl. Acad. Sci. USA 75:145 (1978); Schaefer-Ridder et al., Science 215:166 (1982)), which are herein incorporated by reference.

[0469] Generally, the ratio of DNA to liposomes will be from about 10:1 to about 1:10. Preferably, the ration will be from about 5:1 to about 1:5. More preferably, the ration will be about 3:1 to about 1:3. Still more preferably, the ratio will be about 1:1.

[0470] U.S. Pat. No. 5,676,954 (which is herein incorporated by reference) reports on the injection of genetic material, complexed with cationic liposomes carriers, into mice. U.S. Pat. Nos. 4,897,355, 4,946,787, 5,049,386, 5,459,127, 5,589,466, 5,693,622, 5,580,859, 5,703,055, and international publication no. WO 94/9469 (which are herein incorporated by reference) provide cationic lipids for use in transfecting DNA into cells and mammals. U.S. Pat. Nos. 5,589,466, 5,693,622, 5,580,859, 5,703,055, and International Publication No. WO 94/9469 provide methods for delivering DNA-cationic lipid complexes to mammals.

[0471] In certain embodiments, cells are engineered, ex vivo or in vivo, using a retroviral particle containing RNA, which comprises a sequence encoding a polypeptide of the present invention. Retroviruses from which the retroviral plasmid vectors may be derived include, but are not limited to, Moloney Murine Leukemia Virus, spleen necrosis virus, Rous sarcoma Virus, Harvey Sarcoma Virus, avian leukosis virus, gibbon ape leukemia virus, human immunodeficiency virus, Myeloproliferative Sarcoma Virus, and mammary tumor virus.

[0472] The retroviral plasmid vector is employed to transduce packaging cell lines to form producer cell lines. Examples of packaging cells which may be transfected include, but are not limited to, the PE501, PA317, R-2, R-AM, PA12, T19-14X, VT-19-17-H2, RCRE, RCRIP, GP+E-86, GP+envAm12, and DAN cell lines as described in Miller, Human Gene Therapy 1:5-14 (1990), which is incorporated herein by reference in its entirety. The vector may transduce the packaging cells through any means known in the art. Such means include, but are not limited to, electroporation, the use of liposomes, and CaPO₄ precipitation. In one alternative, the retroviral plasmid vector may be encapsulated into a liposome, or coupled to a lipid, and then administered to a host.

[0473] The producer cell line generates infectious retroviral vector particles which include polynucleotide encoding a polypeptide of the present invention. Such retroviral vector particles then may be employed, to transduce eukaryotic cells, either in vitro or in vivo. The transduced eukaryotic cells will express a polypeptide of the present invention.

[0474] In certain other embodiments, cells are engineered, ex vivo or in vivo, with polynucleotide contained in an adenovirus vector. Adenovirus can be manipulated such that it encodes and expresses a polypeptide of the present invention, and at the same time is inactivated in terms of its ability to replicate in a normal lytic viral life cycle. Adenovirus expression is achieved without integration of the viral DNA into the host cell chromosome, thereby alleviating concerns about insertional mutagenesis. Furthermore, adenoviruses have been used as live enteric vaccines for many years with an excellent safety profile (Schwartz, et al., Am. Rev. Respir. Dis.109:233-238 (1974)). Finally, adenovirus mediated gene transfer has been demonstrated in a number of instances including transfer of alpha-1-antitrypsin and CFTR to the lungs of cotton rats (Rosenfeld et al., Science 252:431-434 (1991); Rosenfeld et al., Cell 68:143-155 (1991)). Furthermore, extensive studies to attempt to establish adenovirus as a causative agent in human cancer were uniformly negative (Green et al., Proc. Natl. Acad. Sci. USA 76:6606 (1979)).

[0475] Suitable adenoviral vectors useful in the present invention are described, for example, in Kozarsky and Wilson, Curr. Opin. Genet. Devel. 3:499-503 (1993); Rosenfeld et al., Cell 68:143-155 (1992); Engelhardt et al., Human Genet. Ther. 4:759-769 (1993); Yang et al., Nature Genet. 7:362-369 (1994); Wilson et al., Nature 365:691-692 (1993); and U.S. Pat. No. 5,652,224, which are herein incorporated by reference. For example, the adenovirus vector Ad2 is useful and can be grown in human 293 cells. These cells contain the E1 region of adenovirus and constitutively express E1a and E1b, which complement the defective adenoviruses by providing the products of the genes deleted from the vector. In addition to Ad2, other varieties of adenovirus (e.g., Ad3, Ad5, and Ad7) are also useful in the present invention.

[0476] Preferably, the adenoviruses used in the present invention are replication deficient. Replication deficient adenoviruses require the aid of a helper virus and/or packaging cell line to form infectious particles. The resulting virus is capable of infecting cells and can express a polynucleotide of interest, which is operably linked to a promoter, but cannot replicate in most cells. Replication deficient adenoviruses may be deleted in one or more of all or a portion of the following genes: E1a, E1b, E3, E4, E2a, or L1 through L5.

[0477] In certain other embodiments, the cells are engineered, ex vivo or in vivo, using an adeno-associated virus (AAV). AAVs are naturally occurring defective viruses that require helper viruses to produce infectious particles (Muzyczka, N., Curr. Topics in Microbiol. Immunol. 158:97 (1992)). It is also one of the few viruses that may integrate its DNA into non-dividing cells. Vectors containing as little as 300 base pairs of AAV can be packaged and can integrate, but space for exogenous DNA is limited to about 4.5 kb. Methods for producing and using such AAVs are known in the art. See, for example, U.S. Pat. Nos. 5,139,941, 5,173,414, 5,354,678, 5,436,146, 5,474,935, 5,478,745, and 5,589,377.

[0478] For example, an appropriate AAV vector for use in the present invention will include all the sequences necessary for DNA replication, encapsidation, and host-cell integration. The polynucleotide construct is inserted into the AAV vector using standard cloning methods, such as those found in Sambrook et al., Molecular Cloning: A Laboratory Manual, Cold Spring Harbor Press (1989). The recombinant AAV vector is then transfected into packaging cells which are infected with a helper virus, using any standard technique, including lipofection, electroporation, calcium phosphate precipitation, etc. Appropriate helper viruses include adenoviruses, cytomegaloviruses, vaccinia viruses, or herpes viruses. Once the packaging cells are transfected and infected, they will produce infectious AAV viral particles, which contain the polynucleotide construct. These viral particles are then used to transduce eukaryotic cells, either ex vivo or in vivo. The transduced cells will contain the polynucleotide construct integrated into its genome, and will express a polypeptide of the invention.

[0479] Another method of gene therapy involves operably associating heterologous control regions and endogenous excretory system antigen polynucleotide sequences (e.g., encoding an excretory system antigen polypeptide of the present invention) via homologous recombination (see, e.g., U.S. Pat. No. 5,641,670, issued Jun. 24, 1997; International Publication No. WO 96/29411, published Sep. 26, 1996; International Publication No. WO 94/12650, published Aug. 4, 1994; Koller et al., Proc. Natl. Acad. Sci. USA 86:8932-8935 (198,9); and Zijlstra et al., Nature 342:435-438 (1989), which are herein incorporated by reference. This method involves the activation of a gene which is present in the target cells, but which is not normally expressed in the cells, or is expressed at a lower level than desired.

[0480] Polynucleotide constructs are made, using standard techniques known in the art, which contain the promoter with targeting sequences flanking the promoter. Suitable promoters are described herein. The targeting sequence is sufficiently complementary to an endogenous sequence to permit homologous recombination of the promoter-targeting sequence with the endogenous sequence. The targeting sequence will be sufficiently near the 5′ end of the desired endogenous polynucleotide sequence so the promoter will be operably linked to the endogenous sequence upon homologous recombination.

[0481] The promoter and the targeting sequences can be amplified using PCR. Preferably, the amplified promoter contains distinct restriction enzyme sites on the 5′ and 3′ ends. Preferably, the 3′ end of the first targeting sequence contains the same restriction enzyme site as the 5′ end of the amplified promoter and the 5′ end of the second targeting sequence contains the same restriction site as the 3′ end of the amplified promoter. The amplified promoter and targeting sequences are digested and ligated together.

[0482] The promoter-targeting sequence construct is delivered to the cells, either as naked polynucleotide, or in conjunction with transfection-facilitating agents, such as liposomes, viral sequences, viral particles, whole viruses, lipofection, precipitating agents, etc., described in more detail above. The P promoter-targeting sequence can be delivered by any method, included direct needle injection, intravenous injection, topical administration, catheter infusion, particle accelerators, etc. The methods are described in more detail below.

[0483] The promoter-targeting sequence construct is taken up by cells. Homologous recombination between the construct and the endogenous sequence takes place, such that an endogenous sequence is placed under the control of the promoter. The promoter then drives the expression of the endogenous sequence.

[0484] The polynucleotide encoding a polypeptide of the present invention may contain a secretory signal sequence that facilitates secretion of the protein. Typically, the signal sequence is positioned in the coding region of the polynucleotide to be expressed towards or at the 5′ end of the coding region. The signal sequence may be homologous or heterologous to the excretory system antigen polynucleotide of interest and may be homologous or heterologous to the cells to be transfected. Additionally, the signal sequence may be chemically synthesized using methods known in the art.

[0485] Any mode of administration of any of the above-described polynucleotides constructs can be used so long as the mode results in the expression of one or more molecules in an amount sufficient to provide a therapeutic effect. This includes direct needle injection, systemic injection, catheter infusion, biolistic injectors, particle accelerators (i.e., “gene guns”), gelfoam sponge depots, other commercially available depot materials, osmotic pumps (e.g., Alza minipumps), oral or suppositorial solid (tablet or pill) pharmaceutical formulations, and decanting or topical applications during surgery. For example, direct injection of naked calcium phosphate-precipitated plasmid into rat liver and rat spleen or a protein-coated plasmid into the portal vein has resulted in gene expression of the foreign gene in the rat livers (Kaneda et al., Science 243:375 (1989)).

[0486] A preferred method of local administration is by direct injection. Preferably, a recombinant molecule of the present invention complexed with a delivery vehicle is administered by direct injection into or locally within the area of arteries. Administration of a composition locally within the area of arteries refers to injecting the composition centimeters and preferably, millimeters within arteries.

[0487] Another method of local administration is to contact a polynucleotide construct of the present invention in or around a surgical wound. For example, a patient can undergo surgery and the polynucleotide construct can be coated on the surface of tissue inside the wound or the construct can be injected into areas of tissue inside the wound.

[0488] Therapeutic compositions useful in systemic administration, include recombinant molecules of the present invention complexed to a targeted delivery vehicle of the present invention. Suitable delivery vehicles for use with systemic administration comprise liposomes comprising ligands for targeting the vehicle to a particular site. In specific embodiments, suitable delivery vehicles for use with systemic administration comprise liposomes comprising polypeptides of the invention for targeting the vehicle to a particular site.

[0489] referred methods of systemic administration, include intravenous injection, aerosol, oral and percutaneous (topical) delivery. Intravenous injections can be performed using methods standard in the art. Aerosol delivery can also be performed using methods standard in the art (see, for example, Stribling et al., Proc. Natl. Acad. Sci. USA 189:11277-11281, 1992, which is incorporated herein by reference). Oral delivery can be performed by complexing a polynucleotide construct of the present invention to a carrier capable of withstanding degradation by digestive enzymes in the gut of an animal. Examples of such carriers, include plastic capsules or tablets, such as those known in the art. Topical delivery can be performed by mixing a polynucleotide construct of the present invention with a lipophilic reagent (e.g., DMSO) that is capable of passing into the skin.

[0490] Determining an effective amount of substance to be delivered can depend upon a number of factors including, for example, the chemical structure and biological activity of the substance, the age and weight of the animal, the precise condition requiring treatment and its severity, and the route of administration. The frequency of treatments depends upon a number of factors, such as the amount of polynucleotide constructs administered per dose, as well as the health and history of the subject. The precise amount, number of doses, and timing of doses will be determined by the attending physician or veterinarian.

[0491] Therapeutic compositions of the present invention can be administered to any animal, preferably to mammals and birds. Preferred mammals include humans, dogs, cats, mice, rats, rabbits sheep, cattle, horses and pigs, with humans being particularly preferred.

[0492] Biological Activities

[0493] Polynucleotides or polypeptides, or agonists or antagonists of the present invention, can be used in assays to test for one or more biological activities. If these polynucleotides or polypeptides, or agonists or antagonists of the present invention, do exhibit activity in a particular assay, it is likely that these molecules may be involved in the diseases associated with the biological activity. Thus, the polynucleotides and polypeptides, and agonists or antagonists could be used to treat, prevent diagnose and/or prognose the associated disease.

[0494] The excretory system antigen polynucleotides and polypeptides of the invention are predicted to have predominant expression in excretory system tissues.

[0495] Thus, the excretory system antigens of the invention may be useful as therapeutic molecules. Each would be useful for diagnosis, detection, treatment and/or prevention of diseases or disorders of the excretory system, including but not limited to renal disorders (e.g., kidney failure, nephritis, blood vessel disorders of kidney, metabolic and congenital kidney disorders, urinary disorders of the kidney, autoimmune disorders, sclerosis and necrosis, and electrolyte imbalance, and kidney cancer), bladder disorders (e.g, urinary tract infection, bladder obstruction, urination disorders, and bladder cancer), urether disorders (e.g., obstruction of the ureter and ureter cancer), urethra disorders (e.g., obstruction of the urethra and urethra cancers) and/or those disorders as discribed under “Urinary System Disorders” below.

[0496] In a preferred embodiment, polynucleotides of the invention (e.g., a nucleic acid sequence of SEQ ID NO: X or the complement thereof, or the cDNA sequence contained in Clone ID NO: Z, or fragments or variants thereof) and/or polypeptides of the invention (e.g., an amino acid sequence contained in SEQ ID NO: Y, an amino acid sequence encoded by SEQ ID NO: X, or the complement threof, an amino acid sequence encoded by the cDNA sequence contained in Clone ID NO: Z and fragments or variants thereof as described herein) are useful for the diagnosis, detection, treatement, and/or prevention of diseases or disorders of the tissues/cells corresponding to the library source disclosed in column 7 of Table 1A expressing the corresponding excretory system sequence disclosed in the same row of Table 1A.

[0497] In certain embodiments, a polypeptide of the invention, or polynucleotides, antibodies, agonists, or antagonists corresponding to that polypeptide, may be used to diagnose and/or prognose diseases and/or disorders associated with the tissue(s) in which the polypeptide of the invention is expressed, including one, two, three, four, five, or more tissues disclosed in Table 1A, column 7 (Tissue Distribution Library Code).

[0498] Particularly, the excretory system antigens may be a useful therapeutic for cancer of excretory system tissues. Treatment, diagnosis, detection, and/or prevention of excretory system disorders could be carried out using an excretory system antigen or soluble form of a excretory system antigen, an excretory system antigen ligand, gene therapy, or ex vivo applications. Moreover, inhibitors of an excretory system antigen, either blocking antibodies or mutant forms, could modulate the expression of the excretory system antigen. These inhibitors may be useful to treat, diagnose, detect, and/or prevent diseases associated with the misregulation of an excretory system antigen.

[0499] In one embodiment, the invention provides a method for the specific delivery of compositions of the invention to cells (e.g., normal or diseased excretory system cells) by administering polypeptides of the invention (e.g., excretory system antigen polypeptides or anti-excretory system antigen antibodies) that are associated with heterologous polypeptides or nucleic acids. In one example, the invention provides a method for delivering a therapeutic protein into the targeted cell (e.g., an, aberrant excretory system cell or excretory system cancer cell). In another example, the invention provides a method for delivering a single stranded nucleic acid (e.g., antisense or ribozymes) or double stranded nucleic acid (e.g., DNA that can integrate into the cell's genome or replicate episomally and that can be transcribed) into the targeted cell.

[0500] In another embodiment, the invention provides a method for the specific destruction of cells (e.g., the destruction of aberrant excretory system cells, including, but not limited to, excretory system tumor cells) by administering polypeptides of the invention (e.g., excretory system antigen polypeptides or fragments thereof, or anti-excretory system antigen antibodies) in association with toxins or cytotoxic prodrugs.

[0501] By “toxin” is meant compounds that bind and activate endogenous cytotoxic effector systems, radioisotopes, holotoxins, modified toxins, catalytic subunits of toxins, cytotoxins (cytotoxic agents), or any molecules or enzymes not normally present in or on the surface of a cell that under defined conditions cause the cell's death. Toxins that may be used according to the methods of the invention include, but are not limited to, radioisotopes known in the art, compounds such as, for example, antibodies (or complement fixing containing portions thereof) that bind an inherent or induced endogenous cytotoxic effector system, thymidine kinase, endonuclease, RNAse, alpha toxin, ricin, abrin, Pseudomonas exotoxin A, diphtheria toxin, saporin, momordin, gelonin, pokeweed antiviral protein, alpha-sarcin and cholera toxin. “Toxin” also includes a cytostatic or cytocidal agent, a therapeutic agent or a radioactive metal ion, e.g., alpha-emitters such as, for example, ²¹³Bi, or other radioisotopes such as, for example, ¹⁰³Pd, ¹³³Xe, ¹³¹I, ⁶⁸Ge, ⁵⁷Co, ⁶⁵Zn, ⁸⁵Sr, ³²P, ³⁵S, ⁹⁰Y, ¹⁵³Sm, ¹⁵³Gd, ¹⁶⁹Yb, ⁵¹Cr, ⁵⁴Mn, ⁷⁵Se, ¹¹³Sn, ⁹⁰Yttrium, ¹¹⁷Tin, ¹⁸⁶Rhenium, ¹⁶⁶Holmium, and ¹⁸⁸Rhenium; luminescent labels, such as luminol; and fluorescent labels, such as fluorescein and rhodamine, and biotin.

[0502] Techniques known in the art may be applied to label antibodies of the invention. Such techniques include, but are not limited to, the use of bifunctional conjugating agents (see e.g., U.S. Pat. Nos. 5,756,065; 5,714,631; 5,696,239; 5,652,361; 5,505,931; 5,489,425; 5,435,990; 5,428,139; 5,342,604; 5,274,119; 4,994,560; and 5,808,003; the contents of each of which are hereby incorporated by reference in its entirety). A cytotoxin or cytotoxic agent includes any agent that is detrimental to cells. Examples include paclitaxol, cytochalasin B, gramicidin D, ethidium bromide, emetine, mitomycin, etoposide, tenoposide, vincristine, vinblastine, colchicin, doxorubicin, daunorubicin, dihydroxy anthracin dione, mitoxantrone, mithramycin, actinomycin D, 1-dehydrotestosterone, glucocorticoids, procaine, tetracaine, lidocaine, propranolol, and puromycin and analogs or homologs thereof. Therapeutic agents include, but are not limited to, antimetabolites (e.g., methotrexate, 6-mercaptopurine, 6-thioguanine, cytarabine, 5-fluorouracil decarbazine), alkylating agents (e.g., mechlorethamine, thioepa chlorambucil, melphalan, carmustine (BSNU) and lomustine (CCNU), cyclothosphamide, busulfan, dibromomannitol, streptozotocin, mitomycin C, and cis- dichlorodiamine platinum (II) (DDP) cisplatin), anthracyclines (e.g., daunorubicin (formerly daunomycin) and doxorubicin), antibiotics (e.g., dactinomycin (formerly actinomycin), bleomycin, mithramycin, and anthramycin (AMC)), and anti-mitotic agents (e.g., vincristine and vinblastine).

[0503] By “cytotoxic prodrug” is meant a non-toxic compound that is converted by an enzyme, normally present in the cell, into a cytotoxic compound. Cytotoxic prodrugs that may be used according to the methods of the invention include, but are not limited to, glutamyl derivatives of benzoic acid mustard alkylating agent, phosphate derivatives of etoposide or mitomycin C, cytosine arabinoside, daunorubisin, and phenoxyacetamide derivatives of doxorubicin.

[0504] It will be appreciated that conditions caused by a decrease in the standard or normal level of an excretory system antigen activity in an individual, particularly disorders of the excretory system, can be treated by administration of an excretory system antigen polypeptide (e.g., such as, for example, the complete excretory system antigen polypeptide, the soluble form of the extracellular domain of an excretory system antigen polypeptide, or cells expressing the complete protein) or agonist. Thus, the invention also provides a method of treatment of an individual in need of an increased level of excretory system antigen activity comprising administering to such an individual a pharmaceutical composition comprising an amount of an isolated excretory system antigen polypeptide of the invention, or agonist thereof (e.g., an agonistic anti-excretory system antigen antibody), effective to increase the excretory system antigen activity level in such an individual.

[0505] It will also be appreciated that conditions caused by a increase in the standard or normal level of excretory system antigen activity in an individual, particularly disorders of the excretory system, can be treated by administration of excretory system antigen polypeptides (e.g., such as, for example, the complete excretory system antigen polypeptide, the soluble form of the extracellular domain of an excretory system antigen polypeptide, or cells expressing the complete protein) or antagonist (e.g., an antagonistic excretory system antigen antibody). Thus, the invention also provides a method of treatment of an individual in need of an decreased level of excretory system antigen activity comprising administering to such an individual a pharmaceutical composition comprising an amount of an isolated excretory system antigen polypeptide of the invention, or antagonist thereof (e.g., an antagonistic anti-excretory system antigen antibody), effective to decrease the excretory system antigen activity level in such an individual.

[0506] More generally, polynucleotides, translation products and antibodies corresponding to this gene may be useful for the diagnosis, prognosis, prevention, and/or treatment of diseases and/or disorders associated with the following systems.

[0507] Urinary System Disorders

[0508] Polynucleotides, polypeptides, antibodies, and/or agonists or antagonists of the present invention, may be used to treat, prevent, diagnose, and/or prognose disorders of the urinary system, including but not limited to disorders of the renal system, bladder, ureters, and urethra. Renal disorders include, but are not limited to, kidney failure, nephritis, blood vessel disorders of kidney, metabolic and congenital kidney disorders, urinary disorders of the kidney, autoimmune disorders, sclerosis and necrosis, electrolyte imbalance, and kidney cancers.

[0509] Kidney failure diseases include, but are not limited to, acute kidney failure, chronic kidney failure, atheroembolic renal failure, and end-stage renal disease. Inflammatory diseases of the kidney include acute glomerulonephritis, postinfectious glomerulonephritis, rapidly progressive glomerulonephritis, nephrotic syndrome, membranous glomerulonephritis, familial nephrotic syndrome, membranoproliferative glomerulonephritis I and II, mesangial proliferative glomerulonephritis, chronic glomerulonephritis, acute tubulointerstitial nephritis, chronic tubulointerstitial nephritis, acute post-streptococcal glomerulonephritis (PSGN), pyelonephritis, lupus nephritis, chronic nephritis, interstitial nephritis, and post-streptococcal glomerulonephritis.

[0510] Blood vessel disorders of the kidneys include, but are not limited to, kidney infarction, atheroembolic kidney disease, cortical necrosis, malignant nephrosclerosis, renal vein thrombosis, renal underperfusion, renal ischemia-reperfusion, renal artery embolism, and renal artery stenosis. Kidney disorders resulting form urinary tract problems include, but are not limited to, pyelonephritis, hydronephrosis, urolithiasis (renal lithiasis, nephrolithiasis), reflux nephropathy, urinary tract infections, urinary retention, and acute or chronic unilateral obstructive uropathy.

[0511] Metabolic and congenital disorders of the kidneys include, but are not limited to, renal tubular acidosis, renal glycosuria, nephrogenic diabetes insipidus, cystinuria, Fanconi's syndrome, vitamin D-resistant rickets, Hartnup disease, Bartter's syndrome, Liddle's syndrome, polycystic kidney disease, medullary cystic disease, medullary sponge kidney, Alport's syndrome, nail-patella syndrome, congenital nephrotic syndrome, CRUSH syndrome, horseshoe kidney, diabetic nephropathy, nephrogenic diabetes insipidus, analgesic nephropathy, kidney stones, and membranous nephropathy, Kidney disorders resulting from an autoimmune response include, but are not limited to, systemic lupus erythematosus (SLE), Goodpasture syndrome, IgA nephropathy, and IgM mesangial proliferative glomerulonephritis.

[0512] Sclerotic or necrotic disorders of the kidney include, but are not limited to, glomerulosclerosis, diabetic nephropathy, focal segmental glomerulosclerosis (FSGS), necrotizing glomerulonephritis, and renal papillary necrosis. Kidneys may also develop carcinomas, including, but not limited to, hypemephroma, nephroblastoma, renal cell cancer, transitional cell cancer, squamous cell cancer, and Wilm's tumor.

[0513] Kidney disorders may also result in electrolyte imbalances, including, but not limited to, nephrocalcinosis, pyuria, edema, hydronephritis, proteinuria, hyponatremia, hypernatremia, hypokalemia, hyperkalemia, hypocalcemia, hypercalcemia, hypophosphatemia, and hyperphosphatemia.

[0514] Bladder disorders include, but are not limited to, benign prostatic hyperplasia (BPH), interstitial cystitis (IC), prostatitis, proteinuria, urinary tract infections, urinary incontinence, urinary retention. Disorders of the ureters and urethra include, but are not limited to, acute or chronic unilateral obstructive uropathy. The bladder, ureters, and urethra may also develop carcinomas, including, but not limited to, superficial bladder canccer, invasive bladder cancer, carcinoma of the ureter, and urethra cancers.

[0515] Polypeptides may be administered using any method known in the art, including, but not limited to, direct needle injection at the delivery site, intravenous injection, topical administration, catheter infusion, biolistic injectors, particle accelerators, gelfoam sponge depots, other commercially available depot materials, osmotic pumps, oral or suppositorial solid pharmaceutical formulations, decanting or topical applications during surgery, aerosol delivery. Such methods are known in the art. Polypeptides may be administered as part of a Therapeutic, described in more detail below. Methods of delivering polynucleotides are described in more detail herein.

[0516] Immune Activity

[0517] Polynucleotides, polypeptides, antibodies, and/or agonists or antagonists of the present invention may be useful in treating, preventing, diagnosing and/or prognosing diseases, disorders, and/or conditions of the immune system, by, for example, activating or inhibiting the proliferation, differentiation, or mobilization (chemotaxis) of immune cells. Immune cells develop through a process called hematopoiesis, producing myeloid (platelets, red blood cells, neutrophils, and macrophages) and lymphoid (B and T lymphocytes) cells from pluripotent stem cells. The etiology of these immune diseases, disorders, and/or conditions may be genetic, somatic, such as cancer and some autoimmune diseases, acquired (e.g., by chemotherapy or toxins), or infectious. Moreover, polynucleotides, polypeptides, antibodies, and/or agonists or antagonists of the present invention can be used as a marker or detector of a particular immune system disease or disorder.

[0518] In another embodiment, a polypeptide of the invention, or polynucleotides, antibodies, agonists, or antagonists corresponding to that polypeptide, may be used to treat diseases and disorders of the immune system and/or to inhibit or enhance an immune response generated by cells associated with the tissue(s) in which the polypeptide of the invention is expressed, including one, two, three, four, five, or more tissues disclosed in Table 1A, column 7 (Tissue Distribution Library Code).

[0519] In another embodiment, a polypeptide of the invention, or polynucleotides, antibodies, agonists, or antagonists corresponding to that polypeptide, may be used to treat diseases and disorders of the immune system and/or to inhibit or enhance an immune response generated by cells associated with the tissue(s) in which the polypeptide of the invention is expressed, including one, two, three, four, five, or more tissues disclosed in Table 1A, column 8 (Tissue Distribution Library Code).

[0520] Polynucleotides, polypeptides, antibodies, and/or agonists or antagonists of the present invention may be useful in treating, preventing, diagnosing, and/or prognosing immunodeficiencies, including both congenital and acquired immunodeficiencies. Examples of B cell immunodeficiencies in which immunoglobulin levels B cell function and/or B cell numbers are decreased include: X-linked agammaglobulinemia (Bruton's disease), X-linked infantile agammaglobulinemia, X-linked immunodeficiency with hyper IgM, non X-linked immunodeficiency with hyper IgM, X-linked lymphoproliferative syndrome (XLP), agammaglobulinemia including congenital and acquired agammaglobulinemia, adult onset agammaglobulinemia, late-onset agammaglobulinemia, dysgammaglobulinemia, hypogammaglobulinemia, unspecified hypogammaglobulinemia, recessive agammaglobulinemia (Swiss type), Selective IgM deficiency, selective IgA deficiency, selective IgG subclass deficiencies, IgG subclass deficiency (with or without IgA deficiency), Ig deficiency with increased IgM, IgG and IgA deficiency with increased IgM, antibody deficiency with normal or elevated Igs, Ig heavy chain deletions, kappa chain deficiency, B cell lymphoproliferative disorder (BLPD), common variable immunodeficiency (CVID), common variable immunodeficiency (CVI) (acquired), and transient hypogammaglobulinemia of infancy.

[0521] In specific embodiments, ataxia-telangiectasia or conditions associated with ataxia-telangiectasia are treated, prevented, diagnosed, and/or prognosing using the polypeptides or polynucleotides of the invention, and/or agonists or antagonists thereof.

[0522] Examples of congenital immunodeficiencies in which T cell and/or B cell function and/or number is decreased include, but are not limited to: DiGeorge anomaly, severe combined immunodeficiencies (SCID) (including, but not limited to, X-linked SCID, autosomal recessive SCID, adenosine deaminase deficiency, purine nucleoside phosphorylase (PNP) deficiency, Class II MHC deficiency (Bare lymphocyte syndrome), Wiskott-Aldrich syndrome, and ataxia telangiectasia), thymic hypoplasia, third and fourth pharyngeal pouch syndrome, 22q11.2 deletion, chronic mucocutaneous candidiasis, natural killer cell deficiency (NK), idiopathic CD4+ T-lymphocytopenia, immunodeficiency with predominant T cell defect (unspecified), and unspecified immunodeficiency of cell mediated immunity.

[0523] In specific embodiments, DiGeorge anomaly or conditions associated with DiGeorge anomaly are treated, prevented, diagnosed, and/or prognosed using polypeptides or polynucleotides of the invention, or antagonists or agonists thereof.

[0524] Other immunodeficiencies that may be treated, prevented, diagnosed, and/or prognosed using polypeptides or polynucleotides of the invention, and/or agonists or antagonists thereof, include, but are not limited to, chronic granulomatous disease, Chédiak-Higashi syndrome, myeloperoxidase deficiency, leukocyte glucose-6-phosphate dehydrogenase deficiency, X-linked lymphoproliferative syndrome (XLP), leukocyte adhesion deficiency, complement component deficiencies (including C1, C2, C3, C4, C5, C6, C7, C8 and/or C9 deficiencies), reticular dysgenesis, thymic alymphoplasia-aplasia, immunodeficiency with thymoma, severe congenital leukopenia, dysplasia with immunodeficiency, neonatal neutropenia, short limbed dwarfism, and Nezelof syndrome-combined immunodeficiency with Igs.

[0525] In a preferred embodiment, the immunodeficiencies and/or conditions associated with the immunodeficiencies recited above are treated, prevented, diagnosed and/or prognosed using polynucleotides, polypeptides, antibodies, and/or agonists or antagonists of the present invention.

[0526] In a preferred embodiment polynucleotides, polypeptides, antibodies, and/or agonists or antagonists of the present invention could be used as an agent to boost immunoresponsiveness among immunodeficient individuals. In specific embodiments, polynucleotides, polypeptides, antibodies, and/or agonists or antagonists of the present invention could be used as an agent to boost immunoresponsiveness among B cell and/or T cell immunodeficient individuals.

[0527] The polynucleotides, polypeptides, antibodies, and/or agonists or antagonists of the present invention may be useful in treating, preventing, diagnosing and/or prognosing autoimmune disorders. Many autoimmune disorders result from inappropriate recognition of self as foreign material by immune cells. This inappropriate recognition results in an immune response leading to the destruction of the host tissue. Therefore, the administration of polynucleotides and polypeptides of the invention that can inhibit an immune response, particularly the proliferation, differentiation, or chemotaxis of T-cells, may be an effective therapy in preventing autoimmune disorders.

[0528] Autoimmune diseases or disorders that may be treated, prevented, diagnosed and/or prognosed by polynucleotides, polypeptides, antibodies, and/or agonists or antagonists of the present invention include, but are not limited to, one or more of the following: systemic lupus erythematosus, rheumatoid arthritis, ankylosing spondylitis, multiple sclerosis, autoimmune thyroiditis, Hashimoto's thyroiditis, autoimmune hemolytic anemia, hemolytic anemia, thrombocytopenia, autoimmune thrombocytopenia purpura, autoimmune neonatal thrombocytopenia, idiopathic thrombocytopenia purpura, purpura (e.g., Henloch-Scoenlein purpura), autoimmunocytopenia, Goodpasture's syndrome, Pemphigus vulgaris, myasthenia gravis, Grave's disease (hyperthyroidism), and insulin-resistant diabetes mellitus.

[0529] Additional disorders that are likely to have an autoimmune component that may be treated, prevented, and/or diagnosed with the compositions of the invention include, but are not limited to, type II collagen-induced arthritis, antiphospholipid syndrome, dermatitis, allergic encephalomyelitis, myocarditis, relapsing polychondritis, rheumatic heart disease, neuritis, uveitis ophthalmia, polyendocrinopathies, Reiter's Disease, Stiff-Man Syndrome, autoimmune pulmonary inflammation, autism, Guillain-Barre Syndrome, insulin dependent diabetes mellitus, and autoimmune inflammatory eye disorders.

[0530] Additional disorders that are likely to have an autoimmune component that may be treated, prevented, diagnosed and/or prognosed with the compositions of the invention include, but are not limited to, scleroderma with anti-collagen antibodies (often characterized, e.g., by nucleolar and other nuclear antibodies), mixed connective tissue disease (often characterized, e.g., by antibodies to extractable nuclear antigens (e.g., ribonucleoprotein)), polymyositis (often characterized, e.g., by nonhistone ANA), pernicious anemia (often characterized, e.g., by antiparietal cell, microsomes, and intrinsic factor antibodies), idiopathic Addison's disease (often characterized, e.g., by humoral and cell-mediated adrenal cytotoxicity, infertility (often characterized, e.g., by antispermatozoal antibodies), glomerulonephritis (often characterized, e.g., by glomerular basement membrane antibodies or immune complexes), bullous pemphigoid (often characterized, e.g., by IgG and complement in basement membrane), Sjogren's syndrome (often characterized, e.g., by multiple tissue antibodies, and/or a specific nonhistone ANA (SS-B)), diabetes mellitus (often characterized, e.g., by cell-mediated and humoral islet cell antibodies), and adrenergic drug resistance (including adrenergic drug resistance with asthma or cystic fibrosis) (often characterized, e.g., by beta-adrenergic receptor antibodies).

[0531] Additional disorders that may have an autoimmune component that may be treated, prevented, diagnosed and/or prognosed with the compositions of the invention include, but are not limited to, chronic active hepatitis (often characterized, e.g., by smooth muscle antibodies), primary biliary cirrhosis (often characterized, e.g., by mitochondria antibodies), other endocrine gland failure (often characterized, e.g., by specific tissue antibodies in some cases), vitiligo (often characterized, e.g., by melanocyte antibodies), vasculitis (often characterized, e.g., by Ig and complement in vessel walls and/or low serum complement), post-MI (often characterized, e.g., by myocardial antibodies), cardiotomy syndrome (often characterized, e.g., by myocardial antibodies), urticaria (often characterized, e.g., by IgG and IgM antibodies to IgE), atopic dermatitis (often characterized, e.g., by IgG and IgM antibodies to IgE), asthma (often characterized, e.g., by IgG and IgM antibodies to IgE), and many other inflammatory, granulomatous, degenerative, and atrophic disorders.

[0532] In a preferred embodiment, the autoimmune diseases and disorders and/or conditions associated with the diseases and disorders recited above are treated, prevented, diagnosed and/or prognosed using for example, antagonists or agonists, polypeptides or polynucleotides, or antibodies of the present invention. In a specific preferred embodiment, rheumatoid arthritis is treated, prevented, and/or diagnosed using polynucleotides, polypeptides, antibodies, and/or agonists or antagonists of the present invention.

[0533] In another specific preferred embodiment, systemic lupus erythematosus is treated, prevented, and/or diagnosed using polynucleotides, polypeptides, antibodies, and/or agonists or antagonists of the present invention. In another specific preferred embodiment, idiopathic thrombocytopenia purpura is treated, prevented, and/or diagnosed using polynucleotides, polypeptides, antibodies, and/or agonists or agtagonists of the present invention.

[0534] In another specific preferred embodiment IgA nephropathy is treated, prevented, and/or diagnosed using polynucleotides, polypeptides, antibodies, and/or agonists or antagonists of the present invention.

[0535] In a preferred embodiment, the autoimmune diseases and disorders and/or conditions associated with the diseases and disorders recited above are treated, prevented, diagnosed and/or prognosed using polynucleotides, polypeptides, antibodies, and/or agonists or antagonists of the present invention.

[0536] In preferred embodiments, polypeptides, antibodies, polynucleotides and/or agonists or antagonists of the present invention are used as a immunosuppressive agent(s).

[0537] Polynucleotides, polypeptides, antibodies, and/or agonists or antagonists of the present invention may be useful in treating, preventing, prognosing, and/or diagnosing diseases, disorders, and/or conditions of hematopoietic cells. Polynucleotides, polypeptides, antibodies, and/or agonists or antagonists of the present invention could be used to increase differentiation and proliferation of hematopoletic cells, including the pluripotent stem cells, in an effort to treat or prevent those diseases, disorders, and/or conditions associated with a decrease in certain (or many) types hematopoietic cells, including but not limited to, leukopenia, neutropenia, anemia, and thrombocytopenia. Alternatively, Polynucleotides, polypeptides, antibodies, and/or agonists or antagonists of the present invention could be used to increase differentiation and proliferation of hematopoietic cells, including the pluripotent stem cells, in an effort to treat or prevent those diseases, disorders, and/or conditions associated with an increase in certain (or many) types of hematopoietic cells, including but not limited to, histiocytosis.

[0538] Allergic reactions and conditions, such as asthma (particularly allergic asthma) or other respiratory problems, may also be treated, prevented, diagnosed and/or prognosed using polypeptides, antibodies, or polynucleotides of the invention, and/or agonists or antagonists thereof. Moreover, these molecules can be used to treat, prevent, prognose, and/or diagnose anaphylaxis, hypersensitivity to an antigenic molecule, or blood group incompatibility.

[0539] Additionally, polypeptides or polynucleotides of the invention, and/or agonists or antagonists thereof, may be used to treat, prevent, diagnose and/or prognose IgE-mediated allergic reactions. Such allergic reactions include, but are not limited to, asthma, rhinitis, and eczema. In specific embodiments, polynucleotides, polypeptides, antibodies, and/or agonists or antagonists of the present invention may be used to modulate IgE concentrations in vitro or in vivo.

[0540] Moreover, polynucleotides, polypeptides, antibodies, and/or agonists or antagonists of the present invention have uses in the diagnosis, prognosis, prevention, and/or treatment of inflammatory conditions. For example, since polypeptides, antibodies, or polynucleotides of the invention, and/or agonists or antagonists of the invention may inhibit the activation, proliferation and/or differentiation of cells involved in an inflammatory response, these molecules can be used to prevent and/or treat chronic and acute inflammatory conditions. Such inflammatory conditions include, but are not limited to, for example, inflammation associated with infection (e.g., septic shock, sepsis, or systemic inflammatory response syndrome), ischemia-reperfusion injury, endotoxin lethality, complement-mediated hyperacute rejection, nephritis, cytokine or chemokine induced lung injury, inflammatory bowel disease, Crohn's disease, over production of cytokines (e.g., TNF or IL-1.), respiratory disorders (e.g., asthma and allergy); gastrointestinal disorders (e.g., inflammatory bowel disease); cancers (e.g., gastric, ovarian, lung, bladder, liver, and breast); CNS disorders (e.g., multiple sclerosis; ischemic brain injury and/or stroke, traumatic brain injury, neurodegenerative disorders (e.g., Parkinson's disease and Alzheimer's disease); AIDS-related dementia; and prion disease); cardiovascular disorders (e.g., atherosclerosis, myocarditis, cardiovascular disease, and cardiopulmonary bypass complications); as well as many additional diseases, conditions, and disorders that are characterized by inflammation (e.g., hepatitis, rheumatoid arthritis, gout, trauma, pancreatitis, sarcoidosis, dermatitis, renal ischemia-reperfusion injury, Grave's disease, systemic lupus erythematosus, diabetes mellitus, and allogenic transplant rejection).

[0541] Because inflammation is a fundamental defense mechanism, inflammatory disorders can effect virtually any tissue of the body. Accordingly, polynucleotides, polypeptides, and antibodies of the invention, as well as agonists or antagonists thereof, have uses in the treatment of tissue-specific inflamrnatory disorders, including, but not limited to, adrenalitis, alveolitis, angiocholecystitis, appendicitis, balanitis, blepharitis, bronchitis, bursitis, carditis, cellulitis, cervicitis, cholecystitis, chorditis, cochlitis, colitis, conjunctivitis, cystitis, dermatitis, diverticulitis, encephalitis, endocarditis, esophagitis, eustachitis, fibrositis, folliculitis, gastritis, gastroenteritis, gingivitis, glossitis, hepatosplenitis, keratitis, labyrinthitis, laryngitis, lymphangitis, mastitis, media otitis, meningitis, metritis, mucitis, myocarditis, myosititis, myringitis, nephritis, neuritis, orchitis, osteochondritis, otitis, pericarditis, peritendonitis, peritonitis, pharyngitis, phlebitis, poliomyelitis, prostatitis, pulpitis, retinitis, rhinitis, salpingitis, scleritis, sclerochoroiditis, scrotitis, sinusitis, spondylitis, steatitis, stomatitis, synovitis, syringitis, tendonitis, tonsillitis, urethritis, and vaginitis.

[0542] In specific embodiments, polypeptides, antibodies, or polynucleotides of the invention, and/or agonists or antagonists thereof, are useful to diagnose, prognose, prevent, and/or treat organ transplant rejections and graft-versus-host disease. Organ rejection occurs by host immune cell destruction of the transplanted tissue through an immune response. Similarly, an immune response is also involved in GVHD, but, in this case, the foreign transplanted immune cells destroy the host tissues. Polypeptides, antibodies, or polynucleotides of the invention, and/or agonists or antagonists thereof, that inhibit an immune response, particularly the activation, proliferation, differentiation, or chemotaxis of T-cells, may be an effective therapy in preventing organ rejection or GVHD. In specific embodiments, polypeptides, antibodies, or polynucleotides of the invention, and/or agonists or antagonists thereof, that inhibit an immune response, particularly the activation, proliferation, differentiation, or chemotaxis of T-cells, may be an effective therapy in preventing experimental allergic and hyperacute xenograft rejection.

[0543] In other embodiments, polypeptides, antibodies, or polynucleotides of the invention, and/or agonists or antagonists thereof, are useful to diagnose, prognose, prevent, and/or treat immune complex diseases, including, but not limited to, serum sickness, post streptococcal glomerulonephritis, polyarteritis nodosa, and immune complex-induced vasculitis.

[0544] Polypeptides, antibodies, polynucleotides and/or agonists or antagonists of the invention can be used to treat, detect, and/or prevent infectious agents. For example, by increasing the immune response, particularly increasing the proliferation activation and/or differentiation of B and/or T cells, infectious diseases may be treated, detected, and/or prevented. The immune response may be increased by either enhancing an existing immune response, or by initiating a new immune response. Alternatively, polynucleotides, polypeptides, antibodies, and/or agonists or antagonists of the present invention may also directly inhibit the infectious agent (refer to section of application listing infectious agents, etc), without necessarily eliciting an immune response.

[0545] In another embodiment, polypeptides, antibodies, polynucleotides and/or agonists or antagonists of the present invention are used as a vaccine adjuvant that enhances immune responsiveness to an antigen. In a specific embodiment, polypeptides, antibodies, polynucleotides and/or agonists or antagonists of the present invention are used as an adjuvant to enhance tumor-specific immune responses.

[0546] In another specific embodiment, polypeptides, antibodies, polynucleotides and/or agonists or antagonists of the present invention are used as an adjuvant to enhance anti-viral immune responses. Anti-viral immune responses that may be enhanced using the compositions of the invention as an adjuvant, include virus and virus associated diseases or symptoms described herein or otherwise known in the art. In specific embodiments, the compositions of the invention are used as an adjuvant to enhance an immune response to a virus, disease, or symptom selected from the group consisting of: AIDS, meningitis, Dengue, EBV, and hepatitis (e.g., hepatitis B). In another specific embodiment, the compositions of the invention are used as an adjuvant to enhance an immune response to a virus, disease, or symptom selected from the group consisting of: HIV/AIDS, respiratory syncytial virus, Dengue, rotavirus, Japanese B encephalitis, influenza A and B, parainfluenza, measles, cytomegalovirus, rabies, Junin, Chikungunya, Rift Valley Fever, herpes simplex, and yellow fever.

[0547] In another specific embodiment, polypeptides, antibodies, polynucleotides and/or agonists or antagonists of the present invention are used as an adjuvant to enhance anti-bacterial or anti-fungal immune responses. Anti-bacterial or anti-fungal immune responses that may be enhanced using the compositions of the invention as an adjuvant, include bacteria or fungus and bacteria or fungus associated diseases or symptoms described herein or otherwise known in the art. In specific embodiments, the compositions of the invention are used as an adjuvant to enhance an immune response to a bacteria or fungus, disease, or symptom selected from the group consisting of: tetanus, Diphtheria, botulism, and meningitis type B.

[0548] In another specific embodiment, the compositions of the invention are used as an adjuvant to enhance an immune response to a bacteria or fungus, disease, or symptom selected from the group consisting of: Vibrio cholerae, Mycobacterium leprae, Salmonella typhi, Salmonella paratyphi, Meisseria meningitidis, Streptococcus pneumoniae, Group B streptococcus, Shigella spp., Enterotoxigenic Escherichia coli, Enterohemorrhagic E. coli, and Borrelia burgdorferi.

[0549] In another specific embodiment, polypeptides, antibodies, polynucleotides and/or agonists or antagonists of the present invention are used as an adjuvant to enhance anti-parasitic immune responses. Anti-parasitic immune responses that may be enhanced using the compositions of the invention as an adjuvant, include parasite and parasite associated diseases or symptoms described herein or otherwise known in the art. In specific embodiments, the compositions of the invention are used as an adjuvant to enhance an immune response to a parasite. In another specific embodiment, the compositions of the invention are used as an adjuvant to enhance an immune response to Plasmodium (malaria) or Leishmania.

[0550] In another specific embodiment, polypeptides, antibodies, polynucleotides and/or agonists or antagonists of the present invention may also be employed to treat infectious diseases including silicosis, sarcoidosis, and idiopathic pulmonary fibrosis; for example, by preventing the recruitment and activation of mononuclear phagocytes.

[0551] In another specific embodiment, polypeptides, antibodies, polynucleotides and/or agonists or antagonists of the present invention are used as an antigen for the generation of antibodies to inhibit or enhance immune mediated responses against polypeptides of the invention.

[0552] In one embodiment, polypeptides, antibodies, polynucleotides and/or agonists or antagonists of the present invention are administered to an animal (e.g., mouse, rat, rabbit, hamster, guinea pig, pigs, micro-pig, chicken, camel, goat, horse, cow, sheep, dog, cat, non-human primate, and human, most preferably human) to boost the immune system to produce increased quantities of one or more antibodies (e.g., IgG, IgA, IgM, and IgE), to induce higher affinity antibody production and immunoglobulin class switching (e.g., IgG, IgA, IgM, and IgE), and/or to increase an immune response.

[0553] In another specific embodiment, polypeptides, antibodies, polynucleotides and/or agonists or antagonists of the present invention are used as a stimulator of B cell responsiveness to pathogens.

[0554] In another specific embodiment, polypeptides, antibodies, polynucleotides and/or agonists or antagonists of the present invention are used as an activator of T cells.

[0555] In another specific embodiment, polypeptides, antibodies, polynucleotides and/or agonists or antagonists of the present invention are used as an agent that elevates the immune status of an individual prior to their receipt of immunosuppressive therapies.

[0556] In another specific embodiment, polypeptides, antibodies, polynucleotides and/or agonists or antagonists of the present invention are used as an agent to induce higher affinity antibodies.

[0557] In another specific embodiment, polypeptides, antibodies, polynucleotides and/or agonists or antagonists of the present invention are used as an agent to increase serum immunoglobulin concentrations.

[0558] In another specific embodiment, polypeptides, antibodies, polynucleotides and/or agonists or antagonists of the present invention are used as an agent to accelerate recovery of immunocompromised individuals.

[0559] In another specific embodiment, polypeptides, antibodies, polynucleotides and/or agonists or antagonists of the present invention are used as an agent to boost immunoresponsiveness among aged populations and/or neonates.

[0560] In another specific embodiment, polypeptides, antibodies, polynucleotides and/or agonists or antagonists of the present invention are used as an immune system enhancer prior to, during, or after bone marrow transplant and/or other transplants (e.g., allogeneic or xenogeneic organ transplantation). With respect to transplantation, compositions of the invention may be administered prior to, concomitant with, and/or after transplantation. In a specific embodiment, compositions of the invention are administered after transplantation, prior to the beginning of recovery of T-cell populations. In another specific embodiment, compositions of the invention are first administered after transplantation after the beginning of recovery of T cell populations, but prior to full recovery of B cell populations.

[0561] In another specific embodiment, polypeptides, antibodies, polynucleotides and/or agonists or antagonists of the present invention are used as an agent to boost immunoresponsiveness among individuals having an acquired loss of B cell function. Conditions resulting in an acquired loss of B cell function that may be ameliorated or treated by administering the polypeptides, antibodies, polynucleotides and/or agonists or antagonists thereof, include, but are not limited to, HIV Infection, AIDS, bone marrow transplant, and B cell chronic lymphocytic leukemia (CLL).

[0562] In another specific embodiment, polypeptides, antibodies, polynucleotides and/or agonists or antagonists of the present invention are used as an agent to boost immunoresponsiveness among individuals having a temporary immune deficiency. Conditions resulting in a temporary immune deficiency that may be ameliorated or treated by administering the polypeptides, antibodies, polynucleotides and/or agonists or antagonists thereof, include, but are not limited to, recovery from viral infections (e.g., influenza), conditions associated with malnutrition, recovery from infectious mononucleosis, or conditions associated with stress, recovery from measles, recovery from blood transfusion, and recovery from surgery.

[0563] In another specific embodiment, polypeptides, antibodies, polynucleotides and/or agonists or antagonists of the present invention are used as a regulator of antigen presentation by monocytes, dendritic cells, and/or B-cells. In one embodiment, polynucleotides, polypeptides, antibodies, and/or agonists or antagonists of the present invention enhance antigen presentation or antagonizes antigen presentation in vitro or in vivo. Moreover, in related embodiments, said enhancement or antagonism of antigen presentation may be useful as an anti-tumor treatment or to modulate the immune system.

[0564] In another specific embodiment, polypeptides, antibodies, polynucleotides and/or agonists or antagonists of the present invention are used as an agent to direct an individual's immune system towards development of a humoral response (i.e. TH2) as opposed to a TH1 cellular response.

[0565] In another specific embodiment, polypeptides, antibodies, polynucleotides and/or agonists or antagonists of the present invention are used as a means to induce tumor proliferation and thus make it more susceptible to anti-neoplastic agents. For example, multiple myeloma is a slowly dividing disease and is thus refractory to virtually all anti-neoplastic regimens. If these cells were forced to proliferate more rapidly their susceptibility profile would likely change.

[0566] In another specific embodiment, polypeptides, antibodies, polynucleotides and/or agonists or antagonists of the present invention are used as a stimulator of B cell production in pathologies such as AIDS, chronic lymphocyte disorder and/or Common Variable Immunodificiency.

[0567] In another specific embodiment, polypeptides, antibodies, polynucleotides and/or agonists or antagonists of the present invention are used as a therapy for generation and/or regeneration of lymphoid tissues following surgery, trauma or genetic defect. In another specific embodiment, polypeptides, antibodies, polynucleotides and/or agonists or antagonists of the present invention are used in the pretreatment of bone marrow samples prior to transplant.

[0568] In another specific embodiment, polypeptides, antibodies, polynucleotides and/or agonists or antagonists of the present invention are used as a gene-based therapy for genetically inherited disorders resulting in immuno-incompetence/immunodeficiency such as observed among SCID patients.

[0569] In another specific embodiment, polypeptides, antibodies, polynucleotides and/or agonists or antagonists of the present invention are used as a means of activating monocytes/macrophages to defend against parasitic diseases that effect monocytes such as Leishmania.

[0570] In another specific embodiment, polypeptides, antibodies, polynucleotides and/or agonists or antagonists of the present invention are used as a means of regulating secreted cytokines that are elicited by polypeptides of the invention.

[0571] In another embodiment, polypeptides, antibodies, polynucleotides and/or agonists or antagonists of the present invention are used in one or more of the applications decribed herein, as they may apply to veterinary medicine.

[0572] In another specific embodiment, polypeptides, antibodies, polynucleotides and/or agonists or antagonists of the present invention are used as a means of blocking various aspects of immune responses to foreign agents or self. Examples of diseases or conditions in which blocking of certain aspects of immune responses may be desired include autoimmune disorders such as lupus, and arthritis, as well as immunoresponsiveness to skin allergies, inflammation, bowel disease, injury and diseases/disorders associated with pathogens.

[0573] In another specific embodiment, polypeptides, antibodies, polynucleotides and/or agonists or antagonists of the present invention are used as a therapy for preventing the B cell proliferation and Ig secretion associated with autoimmune diseases such as idiopathic thrombocytopenic purpura, systemic lupus erythematosus and multiple sclerosis.

[0574] In another specific embodiment, polypeptides, antibodies, polynucleotides and/or agonists or antagonists of the present invention are used as a inhibitor of B and/or T cell migration in endothelial cells. This activity disrupts tissue architecture or cognate responses and is useful, for example in disrupting immune responses, and blocking sepsis.

[0575] In another specific embodiment, polypeptides, antibodies, polynucleotides and/or agonists or antagonists of the present invention are used as a therapy for chronic hypergammaglobulinemia evident in such diseases as monoclonal gammopathy of undetermined significance (MGUS), Waldenstrom's disease, related idiopathic monoclonal gammopathies, and plasmacytpmas.

[0576] In another specific embodiment, polypeptides, antibodies, polynucleotides and/or agonists or antagonists of the present invention may be employed for instance to inhibit polypeptide chemotaxis and activation of macrophages and their precursors, and of neutrophils, basophils, B lymphocytes and some T-cell subsets, e.g., activated and CD8 cytotoxic T cells and natural killer cells, in certain autoimmune and chronic inflammatory and infective diseases. Examples of autoimmune diseases are described herein and include multiple sclerosis, and insulin-dependent diabetes.

[0577] The polypeptides, antibodies, polynucleotides and/or agonists or antagonists of the present invention may also be employed to treat idiopathic hypereosinophilic syndrome by, for example, preventing eosinophil production and migration.

[0578] In another specific embodiment, polypeptides, antibodies, polynucleotides and/or agonists or antagonists of the present invention are used to enhance or inhibit complement mediated cell lysis.

[0579] In another specific embodiment, polypeptides, antibodies, polynucleotides and/or agonists or antagonists of the present invention are used to enhance or inhibit antibody dependent cellular cytotoxicity.

[0580] In another specific embodiment, polypeptides, antibodies, polynucleotides and/or agonists or antagonists of the present invention may also be employed for treating atherosclerosis, for example, by preventing monocyte infiltration in the artery wall.

[0581] In another specific embodiment, polypeptides, antibodies, polynucleotides and/or agonists or antagonists of the present invention may be employed to treat adult respiratory distress syndrome (ARDS).

[0582] In another specific embodiment, polypeptides, antibodies, polynucleotides and/or agonists or antagonists of the present invention may be useful for stimulating wound and tissue repair, stimulating angiogenesis, and/or stimulating the repair of vascular or lymphatic diseases or disorders. Additionally, agonists and antagonists of the invention may be used to stimulate the regeneration of mucosal surfaces.

[0583] In a specific embodiment, polynucleotides or polypeptides, and/or agonists thereof are used to diagnose, prognose, treat, and/or prevent a disorder characterized by primary or acquired immunodeficiency, deficient serum immunoglobulin production, recurrent infections, and/or immune system dysfunction. Moreover, polynucleotides or polypeptides, and/or agonists thereof may be used to treat or prevent infections of the joints, bones, skin, and/or parotid glands, blood-borne infections (e.g., sepsis, meningitis, septic arthritis, and/or osteomyelitis), autoimmune diseases (e.g., those disclosed herein), inflammatory disorders, and malignancies, and/or any disease or disorder or condition associated with these infections, diseases, disorders and/or malignancies) including, but not limited to, CVID, other primary immune deficiencies, HIV disease, CLL, recurrent bronchitis, sinusitis, otitis media, conjunctivitis, pneumonia, hepatitis, meningitis, herpes zoster (e.g., severe herpes zoster), and/or pneumocystis carnii. Other diseases and disorders that may be prevented, diagnosed, prognosed, and/or treated with polynucleotides or polypeptides, and/or agonists of the present invention include, but are not limited to, HIV infection, HTLV-BLV infection, lymphopenia, phagocyte bactericidal dysfunction anemia, thrombocytopenia, and hemoglobinuria.

[0584] In another embodiment, polynucleotides, polypeptides, antibodies, and/or agonists or antagonists of the present invention are used to treat, and/or diagnose an individual having common variable immunodeficiency disease (“CVID”; also known as “acquired agammaglobulinemia” and “acquired hypogammaglobulinemia”) or a subset of this disease.

[0585] In a specific embodiment, polynucleotides, polypeptides, antibodies, and/or agonists or antagonists of the present invention may be used to diagnose, prognose, prevent, and/or treat cancers or neoplasms including immune cell or immune tissue-related cancers or neoplasms. Examples of cancers or neoplasms that may be prevented, diagnosed, or treated by polynucleotides, polypeptides, antibodies, and/or agonists or antagonists of the present invention include, but are not limited to, acute myelogenous leukemia, chronic myelogenous leukemia, Hodgkin's disease, non-Hodgkin's lymphoma, acute lymphocytic anemia (ALL) Chronic lymphocyte leukemia, plasmacytomas, multiple myeloma, Burkitt's lymphoma, EBV-transformed diseases, and/or diseases and disorders described in the section entitled “Hyperproliferative Disorders” elsewhere herein.

[0586] In another specific embodiment, polypeptides, antibodies, polynucleotides and/or agonists or antagonists of the present invention are used as a therapy for decreasing cellular proliferation of Large B-cell Lymphomas.

[0587] In another specific embodiment, polypeptides, antibodies, polynucleotides and/or agonists or antagonists of the present invention are used as a means of decreasing the involvement of B cells and Ig associated with Chronic Myelogenous Leukemia.

[0588] In specific embodiments, the compositions of the invention are used as an agent to boost immunoresponsiveness among B cell immunodeficient individuals, such as, for example, an individual who has undergone a partial or complete splenectomy.

[0589] Antagonists of the invention include, for example, binding and/or inhibitory antibodies, antisense nucleic acids, ribozymes or soluble forms of the polypeptides of the present invention (e.g., Fc fusion protein; see, e.g., Example 9). Agonists of the invention include, for example, binding or stimulatory antibodies, and soluble forms of the polypeptides (e.g., Fc fusion proteins; see, e.g., Example 9). polypeptides, antibodies, polynucleotides and/or agonists or antagonists of the present invention may be employed in a composition with a pharmaceutically acceptable carrier, e.g., as described herein.

[0590] In another embodiment, polypeptides, antibodies, polynucleotides and/or agonists or antagonists of the present invention are administered to an animal (including, but not limited to, those listed above, and also including transgenic animals) incapable of producing functional endogenous antibody molecules or having an otherwise compromised endogenous immune system, but which is capable of producing human immunoglobulin molecules by means of a reconstituted or partially reconstituted immune system from another animal (see, e.g., published PCT Application Nos. WO98/24893, WO/9634096, WO/9633735, and WO/9110741). Administration of polypeptides, antibodies, polynucleotides and/or agonists or antagonists of the present invention to such animals is useful for the generation of monoclonal antibodies against the polypeptides, antibodies, polynucleotides and/or agonists or antagonists of the present invention.

[0591] Blood-Related Disorders

[0592] The polynucleotides, polypeptides, antibodies, and/or, agonists or antagonists of the present invention may be used to modulate hemostatic (the stopping of bleeding) or thrombolytic (clot dissolving) activity. For example, by increasing hemostatic or thrombolytic activity, polynucleotides or polypeptides, and/or agonists or antagonists of the present invention could be used to treat or prevent blood coagulation diseases, disorders, and/or conditions (e.g., afibrinogenemia, factor deficiencies, hemophilia), blood platelet diseases, disorders, and/or conditions (e.g., thrombocytopenia), or wounds resulting from trauma, surgery, or other causes. Alternatively, polynucleotides, polypeptides, antibodies, and/or agonists or antagonists of the present invention that can decrease hemostatic or thrombolytic activity could be used to inhibit or dissolve clotting. These molecules could be important in the treatment or prevention of heart attacks (infarction), strokes, or scarring.

[0593] In specific embodiments, the polynucleotides, polypeptides, antibodies, and/or agonists or antagonists of the present invention may be used to prevent, diagnose, prognose, and/or treat thrombosis, arterial thrombosis, venous thrombosis, thromboembolism, pulmonary embolism, atherosclerosis, myocardial infarction, transient ischemic attack, unstable angina. In specific embodiments, the polynucleotides, polypeptides, antibodies, and/or agonists or antagonists of the present invention may be used for the prevention of occulsion of saphenous grafts, for reducing the risk of periprocedural thrombosis as might accompany angioplasty procedures, for reducing the risk of stroke in patients with atrial fibrillation including nonrheumatic atrial fibrillation, for reducing the risk of embolism associated with mechanical heart valves and or mitral valves disease. Other uses for the polynucleotides, polypeptides, antibodies, and/or agonists or antagonists of the present invention, include, but are not limited to, the prevention of occlusions in extrcorporeal devices (e.g., intravascular canulas, vascular access shunts in hemodialysis patients, hemodialysis machines, and cardiopulmonary bypass machines).

[0594] In another embodiment, a polypeptide of the invention, or polynucleotides, antibodies, agonists, or antagonists corresponding to that polypeptide, may be used to prevent, diagnose, prognose, and/or treat diseases and disorders of the blood and/or blood forming organs associated with the tissue(s) in which the polypeptide of the invention is expressed, including one, two, three, four, five, or more tissues disclosed in Table 1A, column 7 (Tissue Distribution Library Code).

[0595] In another embodiment, a polypeptide of the invention, or polynucleotides, antibodies, agonists, or antagonists corresponding to that polypeptide, may be used to prevent, diagnose, prognose, and/or treat diseases and disorders of the blood and/or blood forming organs associated with the tissue(s) in which the polypeptide of the invention is expressed, including one, two, three, four, five, or more tissues disclosed in Table 1A, column 7 (Tissue Distribution Library Code).

[0596] The polynucleotides, polypeptides, antibodies, and/or agonists or antagonists of the present invention may be used to modulate hematopoietic activity (the formation of blood cells). For example, the polynucleotides, polypeptides, antibodies, and/or agonists or antagonists of the present invention may be used to increase the quantity of all or subsets of blood cells, such as, for example, erythrocytes, lymphocytes (B or T cells), myeloid cells (e.g., basophils, eosinophils, neutrophils, mast cells, macrophages) and platelets. The ability to decrease the quantity of blood cells or subsets of blood cells may be useful in the prevention,, detection, diagnosis and/or treatment of anemias and leukopenias described below. Alternatively, the polynucleotides, polypeptides, antibodies, and/or agonists or antagonists of the present invention may be used to decrease the quantity of all or subsets of blood cells, such as, for example, erythrocytes, lymphocytes (B or T cells), myeloid cells (e.g., basophils, eosinophils, neutrophils, mast cells, macrophages) and platelets.. The ability to decrease the quantity of blood cells or subsets of blood cells may be useful in the prevention, detection, diagnosis and/or treatment of leukocytoses, such as, for example eosinophilia.

[0597] The, polynucleotides, polypeptides, antibodies, and/or agonists or antagonists of the present invention may be used to prevent, treat, or diagnose blood dyscrasia.

[0598] Anemias are conditions in which the number of red blood cells or amount of hemoglobin (the protein that carries oxygen) in them is below normal. Anemia may be caused by excessive bleeding, decreased red blood cell production, or increased red blood cell destruction (hemolysis). The polynucleotides, polypeptides, antibodies, and/or agonists or antagonists of the present invention may be useful in treating, preventing, and/or diagnosing anemias. Anemias that may be treated prevented or diagnosed by the polynucleotides, polypeptides, antibodies, and/or agonists or antagonists of the present invention include iron deficiency anemia, hypochromic anemia, microcytic anemia, chlorosis, hereditary siderob;astic anemia, idiopathic acquired siderobtastic anemia, red cell aplasia, megaloblastic anemia (e.g., pernicious anemia, (vitamin B12 deficiency) and folic acid deficiency anemia), aplastic anemia, hemolytic anemias (e.g., autoimmune helolytic anemia, microangiopathic hemolytic anemia, and paroxysmal nocturnal hemoglobinuria). The polynucleotides, polypeptides, antibodies, and/or agonists or antagonists of the present invention may be useful in treating, preventing, and/or diagnosing anemias associated with diseases including but not limited to, anemias associated with systemic lupus erythematosus, cancers, lymphomas, chronic renal disease, and enlarged spleens. The polynucleotides, polypeptides, antibodies, and/or agonists or antagonists of the present invention may be useful in treating, preventing, and/or diagnosing anemias arising from drug treatments such as anemias associated with methyldopa, dapsone, and/or sulfadrugs. Additionally, rhe polynucleotides, polypeptides, antibodies, and/or agonists or antagonists of the present invention may be useful in treating, preventing, and/or diagnosing anemias associated with abnormal red blood cell architecture including but not limited to, hereditary spherocytosis, hereditary elliptocytosis, glucose-6-phosphate dehydrogenase deficiency, and sickle cell anemia.

[0599] The polynucleotides, polypeptides, antibodies, and/or agonists or antagonists of the present invention may be useful in treating, preventing, and/or diagnosing hemoglobin abnormalities, (e.g., those associated with sickle cell anemia, hemoglobin C disease, hemoglobin S-C disease, and hemoglobin E disease). Additionally, the polynucleotides, polypeptides, antibodies, and/or agonists or antagonists of the present invention may be useful in diagnosing, prognosing, preventing, and/or treating thalassemias, including, but not limited to major and minor forms of alpha-thalassemia and beta-thalassemia.

[0600] In another embodiment, the polynucleotides, polypeptides, antibodies, and/or agonists or antagonists of the present invention may be useful in diagnosing, prognosing, preventing, and/or treating bleeding disorders including, but not limited to, thrombocytopenia (e.g., idiopathic thrombocytopenic purpura, and thrombotic thrombocytopenic purpura), Von Willebrand's disease, hereditary platelet disorders (e.g., storage pool disease such as Chediak-Higashi and Hermansky-Pudlak syndromes, thromboxane A2 dysfunction, thromboasthenia, and Bernard-Soulier syndrome), hemolytic-uremic syndrome, hemophelias such as hemophelia A or Factor VII deficiency and Christmas disease or Factor IX deficiency, Hereditary Hemorhhagic Telangiectsia, also known as Rendu-Osler-Weber syndrome, allergic purpura (Henoch Schonlein purpura) and disseminated intravascular coagulation.

[0601] The effect of the polynucleotides, polypeptides, antibodies, and/or agonists or antagonists of the present invention on the clotting time of blood may be monitored using any of the clotting tests known in the art including, but not limited to, whole blood partial thromboplastin time (PTT), the activated partial thromboplastin time (aPTT), the activated clotting time (ACT), the recalcified activated clotting time, or the Lee-White Clotting time.

[0602] Several diseases and a variety of drugs can cause platelet dysfunction. Thus, in a specific embodiment, the polynucleotides, polypeptides, antibodies, and/or agonists or antagonists of the present invention may be useful in diagnosing, prognosing, preventing, and/or treating acquired platelet dysfunction such as platelet dysfunction accompanying kidney failure, leukemia, multiple myeloma, cirrhosis of the liver, and systemic lupus erythematosus as well as platelet dysfunction associated with drug treatments, including treatment with aspirin, ticlopidine, nonsteroidal anti-inflammatory drugs (used for arthritis, pain, and sprains), and penicillin in high doses.

[0603] In another embodiment, the polynucleotides, polypeptides, antibodies, and/or agonists or antagonists of the present invention may be useful in diagnosing, prognosing, preventing, and/or treating diseases and disorders characterized by or associated with increased or decreased numbers of white blood cells. Leukopenia occurs when the number of white blood cells decreases below normal. Leukopenias include, but are not limited to, neutropenia and Iymphocytopenia. An increase in the number of white blood cells compared to normal is known as leukocytosis. The body generates increased numbers of white blood cells during infection. Thus, leukocytosis may simply be a normnal physiological parameter that reflects infection. Alternatively, leukocytosis may be an indicator of injury or other disease such as cancer. Leokocytoses, include but are not limited to, eosinophilia, and accumulations of macrophages. In specific embodiments, the polynucleotides, polypeptides, antibodies, and/or agonists or antagonists of the present invention may be useful in diagnosing, prognosing, preventing, and/or treating leukopenia. In other specific embodiments, the polynucleotides, polypeptides, antibodies, and/or agonists or antagonists of the present invention may be useful in diagnosing, prognosing, preventing, and/or treating leukocytosis

[0604] Leukopenia may be a generalized decreased in all types of white blood cells, or may be a specific depletion of particular types of white blood cells. Thus, in specific embodiments, the polynucleotides, polypeptides, antibodies, and/or agonists or antagonists of the present invention may be useful in diagnosing, prognosing, preventing, and/or treating decreases in neutrophil numbers, known as neutropenia. Neutropenias that may be diagnosed, prognosed, prevented, and/or treated by the polynucleotides, polypeptides, antibodies, and/or agonists or antagonists of the present invention include, but are not limited to, infantile genetic agranulocytosis, familial neutropenia, cyclic neutropenia, neutropenias resulting from or associated with dietary deficiencies (e.g., vitamin B 12 deficiency or folic acid deficiency), neutropenias resulting from or associated with drug treatments (e.g., antibiotic regimens such as penicillin treatment, sulfonamide treatment, anticoagulant treatment, anticonvulsant drugs, anti-thyroid drugs, and cancer chemotherapy), and neutropenias resulting from increased neutrophil destruction that may occur in association with some bacterial or viral infections, allergic disorders, autoimmune diseases, conditions in which an individual has an enlarged spleen (e.g., Felty syndrome, malaria and sarcoidosis), and some drug treatment regimens.

[0605] The polynucleotides, polypeptides, antibodies, and/or agonists or antagonists of the present invention may be useful in diagnosing, prognosing, preventing, and/or treating lymphocytopenias (decreased numbers of B and/or T lymphocytes), including, but not limited lymphocytopenias resulting from or associated with stress, drug treatments (e.g., drug treatment with corticosteroids, cancer chemotherapies, and/or radiation therapies), AIDS infection and/or other diseases such as, for example, cancer, rheumatoid arthritis, systemic lupus erythematosus, chronic infections, some viral infections and/or hereditary disorders (e.g., DiGeorge syndrome, Wiskott-Aldrich Syndome, severe combined immunodeficiency, ataxia telangiectsia).

[0606] The polynucleotides, polypeptides, antibodies, and/or agonists or antagonists of the present invention may be useful in diagnosing, prognosing, preventing, and/or treating diseases and disorders associated with macrophage numbers and/or macrophage function including, but not limited to, Gaucher's disease, Niemann-Pick disease, Letterer-Siwe disease and Hand-Schuller-Christian disease.

[0607] In another embodiment, the polynucleotides, polypeptides, antibodies, and/or agonists or antagonists of the present invention may be useful in diagnosing, prognosing, preventing, and/or treating diseases and disorders associated with eosinophil numbers and/or eosinophil function including, but not limited to, idiopathic hypereosinophilic syndrome, eosinophilia-myalgia syndrome, and Hand-Schuller-Christian disease.

[0608] In yet another embodiment, the polynucleotides, polypeptides, antibodies, and/or agonists or antagonists of the present invention may be useful in diagnosing, prognosing, preventing, and/or treating leukemias and lymphomas including, but not limited to, acute lymphocytic (lymphpblastic) leukemia (ALL), acute myeloid (myelocytic, myelogenous, myeloblastic, or myelomonocytic) leukemia, chronic lymphocytic leukemia (e.g., B cell leukemias, T cell leukemias, Sezary syndrome, and Hairy cell leukenia), chronic myelocytic (myeloid, myelogenous, or granulocytic) leukemia, Hodgkin's lymphoma, non-hodgkin's lymphoma, Burkitt's lymphoma, and mycosis fungoides.

[0609] In other embodiments, the polynucleotides, polypeptides, antibodies, and/or agonists or antagonists of the present invention may be useful in diagnosing, prognosing, preventing, and/or treating diseases and disorders of plasma cells including, but not limited to, plasma cell dyscrasias, monoclonal gammaopathies, monoclonal gammopathies of undetermined significance, multiple myeloma, macroglobulinemia, Waldenstrom's macroglobulinemia, cryoglobulinemia, and Raynaud's phenomenon.

[0610] In other embodiments, the polynucleotides, polypeptides, antibodies, and/or agonists or antagonists of the present invention may be useful in treating, preventing, and/or diagnosing myeloproliferative disorders, including but not limited to, polycythemia vera, relative polycythemia, secondary polycythemia, myelofibrosis, acute myelofibrosis, agnogenic myelod metaplasia, thrombocythemia, (including both primary and seconday thrombocythemia) and chronic myelocytic leukemia.

[0611] In other embodiments, the polynucleotides, polypeptides, antibodies, and/or agonists or antagonists of the present invention may be useful as a treatment prior to surgery, to increase blood cell production.

[0612] In other embodiments, the polynucleotides, polypeptides, antibodies, and/or agonists or antagonists of the present invention may be useful as an agent to enhance the migration, phagocytosis, superoxide production, antibody dependent cellular cytotoxicity of neutrophils, eosionophils and macrophages.

[0613] In other embodiments, the polynucleotides, polypeptides, antibodies, and/or agonists or antagonists of the present invention may be useful as an agent to increase the number of stem cells in circulation prior to stem cells pheresis. In another specific embodiment, the polynucleotides, polypeptides, antibodies, and/or agonists or antagonists of the present invention may be useful as an agent to increase the number of stem cells in circulation prior to platelet pheresis.

[0614] In other embodiments, the polynucleotides, polypeptides, antibodies, and/or agonists or antagonists of the present invention may be useful as an agent to increase cytokine production.

[0615] In other embodiments, the polynucleotides, polypeptides, antibodies, and/or agonists or antagonists of the present invention may be useful in preventing, diagnosing, and/or treating primary hematopoietic disorders.

[0616] Hyperproliferative Disorders

[0617] Excretory system associated polynucleotides or polypeptides, or agonists or antagonists thereof, can be used to treat, prevent, diagnose and/or prognose hyperproliferative diseases, disorders, and/or conditions, including neoplasms.

[0618] In a specific embodiment, excretory system associated polynucleotides or polypeptides, or agonists or antagonists thereof, can be used to treat, prevent, and/or diagnose hyperproliferative diseases, disorders, and/or conditions of the excretory system.

[0619] In a preferred embodiment, excretory system associated polynucleotides or polypeptides, or agonists or antagonists thereof, can be used to treat, prevent, and/or diagnose excretory system neoplasms.

[0620] Excretory system associated polynucleotides or polypeptides, or agonists or antagonists of the invention, may inhibit the proliferation of the disorder through direct or indirect interactions. Alternatively, excretory system associated polynucleotides or polypeptides, or agonists or antagonists thereof, may proliferate other cells, which can inhibit the hyperproliferative disorder.

[0621] For example, by increasing an immune response, particularly increasing antigenic qualities of the hyperprotiferative disorder or by proliferating, differentiating, or mobilizing T-cells, hyperproliferative diseases, disorders, and/or conditions can be treated, prevented, and/or diagnosed. This immune response may be increased by either enhancing an existing immune response, or by initiating a new immune response. Alternatively, decreasing an immune response may also be a method of treating, preventing, and/or diagnosing hyperproliferative diseases, disorders, and/or conditions, such as a chemotherapeutic agent.

[0622] Examples of hyperproliferative diseases, disorders, and/or conditions that can be treated, prevented, and/or diagnosed by excretory system associated polynucleotides or polypeptides, or agonists or antagonists thereof, include, but are not limited to neoplasms located in the: prostate, colon, abdomen, bone, breast, digestive system, liver, pancreas, peritoneum, endocrine glands (adrenal, parathyroid, pituitary, testicles, ovary, thymus, thyroid), eye, head and neck, nervous (central and peripheral), lymphatic system, pelvic, skin, soft tissue, spleen, thoracic, and urogenital.

[0623] Similarly, other hyperproliferative disorders can also be treated or detected by polynucleotides or polypeptides, or agonists or antagonists of the present invention. Examples of such hyperproliferative disorders include, but are not limited to: Acute Childhood Lymphoblastic Leukemia, Acute Lymphoblastic Leukemia, Acute Lymphocytic Leukemia, Acute Myeloid Leukemia, Adrenocortical Carcinoma, Adult (Primary) Hepatocellular Cancer, Adult (Primary) Liver Cancer, Adult Acute Lymphocytic Leukemia, Adult Acute Myeloid Leukemia, Adult Hodgkin's Disease, Adult Hodgkin's Lymphoma, Adult Lymphocytic Leukemia, Adult Non-Hodgkin's Lymphoma, Adult Primary Liver Cancer, Adult Soft Tissue Sarcoma, AIDS-Related Lymphoma, AIDS-Related Malignancies, Anal Cancer, Astrocytoma, Bile Duct Cancer, Bladder Cancer, Bone Cancer, Brain Stem Glioma, Brain Tumors, Breast Cancer, Cancer of the Renal Pelvis and Ureter, Central Nervous System (Primary) Lymphoma, Central Nervous System Lymphoma, Cerebellar Astrocytoma, Cerebral Astrocytoma, Cervical Cancer, Childhood (Primary) Hepatocellular Cancer, Childhood (Primary) Liver Cancer, Childhood Acute Lymphoblastic Leukemia, Childhood Acute Myeloid Leukemia, Childhood Brain Stem Glioma, Childhood Cerebellar Astrocytoma, Childhood Cerebral Astrocytoma, Childhood Extracranial Germ Cell Tumors, Childhood Hodgkin's Disease, Childhood Hodgkin's Lymphoma, Childhood Hypothalamic and Visual Pathway Glioma, Childhood Lymphoblastic Leukemia, Childhood Medulloblastoma, Childhood Non-Hodgkin's Lymphoma, Childhood Pineal and Supratentorial Primitive Neuroectodermal Tumors, Childhood Primary Liver Cancer, Childhood Rhabdomyosarcoma, Childhood Soft Tissue Sarcoma, Childhood Visual Pathway and Hypothalamic Glioma, Chronic Lymphocytic Leukemia, Chronic Myelogenous Leukemia, Colon Cancer, Cutaneous T-Cell Lymphoma, Endocrine Pancreas Islet Cell Carcinoma, Endometrial Cancer, Ependymoma, Epithelial Cancer, Esophageal Cancer, Ewing's Sarcoma and Related Tumors, Exocrine Pancreatic Cancer, Extracranial Germ Cell Tumor, Extragonadal Germ Cell Tumor, Extrahepatic Bile Duct Cancer, Eye Cancer, Female Breast Cancer, Gaucher's Disease, Gallbladder Cancer, Gastric Cancer, Gastrointestinal Carcinoid Tumor, Gastrointestinal Tumors, Germ Cell Tumors, Gestational Trophoblastic Tumor, Hairy Cell Leukemia, Head and Neck Cancer, Hepatocellular Cancer, Hodgkin's Disease, Hodgkin's Lymphoma, Hypergammaglobulinemia, Hypopharyngeal Cancer, Intestinal Cancers, Intraocular Melanoma, Islet Cell Carcinoma, Islet Cell Pancreatic Cancer, Kaposi's Sarcoma, Kidney Cancer, Laryngeal Cancer, Lip and Oral Cavity Cancer, Liver Cancer, Lung Cancer, Lymphoproliferative Disorders, Macroglobulinemia, Male Breast Cancer, Malignant Mesothelioma, Malignant Thymoma, Medulloblastoma, Melanoma, Mesothelioma, Metastatic Occult Primary Squamous Neck Cancer, Metastatic Primary Squamous Neck Cancer, Metastatic Squamous Neck Cancer, Multiple Myeloma, Multiple Myeloma/Plasma Cell Neoplasm, Myelodysplastic Syndrome, Myelogenous Leukemia, Myeloid Leukemia, Myeloproliferative Disorders, Nasal Cavity and Paranasal Sinus Cancer, Nasopharyngeal Cancer, Neuroblastoma, Non-Hodgkin's Lymphoma During Pregnancy, Nonmelanoma Skin Cancer, Non-Small Cell Lung Cancer, Occult Primary Metastatic Squamous Neck Cancer, Oropharyngeal Cancer, Osteo-/Malignant Fibrous Sarcoma, Osteosarcoma/Malignant Fibrous Histiocytoma, Osteosarcoma/Malignant Fibrous Histiocytoma of Bone, Ovarian Epithelial Cancer, Ovarian Germ Cell Tumor, Ovarian Low Malignant Potential Tumor, Pancreatic Cancer, Paraproteinemias, Purpura, Parathyroid Cancer, Penile Cancer, Pheochromocytoma, Pituitary Tumor, Plasma Cell Neoplasm/Multiple Mycloma, Primary Central Nervous System Lymphoma, Primary Liver Cancer, Prostate Cancer, Rectal Cancer, Renal Cell Cancer, Renal Pelvis and Ureter Cancer, Retinoblastoma, Rhabdomyosarcoma, Salivary Gland Cancer, Sarcoidosis Sarcomas, Sezary Syndrome, Skin Cancer, Small Cell Lung Cancer, Small Intestine Cancer, Soft Tissue Sarcoma, Squamous Neck Cancer, Stomach Cancer, Supratentorial Primitive Neuroectodermal and Pineal Tumors, T-Cell Lymphoma, Testicular Cancer, Thymoma, Thyroid Cancer, Transitional Cell Cancer of the Renal Pelvis and Ureter, Transitional Renal Pelvis and Ureter Cancer, Trophoblastic Tumors, Ureter and Renal Pelvis Cell Cancer, Urethral Cancer, Uterine Cancer, Uterine Sarcoma, Vaginal Cancer, Visual Pathway and Hypothalamic Glioma, Vulvar Cancer, Waldenstrom's Macroglobulinemia, Wilms' Tumor, and any other hyperproliferative disease, besides neoplasia, located in an organ system listed above.

[0624] In another preferred embodiment, polynucleotides or polypeptides, or agonists or antagonists of the present invention are used to diagnose, prognose, prevent, and/or treat premalignant conditions and to prevent progression to a neoplastic or malignant state, including but not limited to those disorders described above. Such uses are indicated in conditions known or suspected of preceding progression to neoplasia or cancer, in particular, where non-neoplastic cell growth consisting of hyperplasia, metaplasia, or most particularly, dysplasia has occurred (for review of such abnormal growth conditions, see Robbins and Angell, 1976, Basic Pathology, 2d Ed., W. B. Saunders Co., Philadelphia, pp. 68-79.)

[0625] Hyperplasia is a form of controlled cell proliferation, involving an increase in cell number in a tissue or organ, without significant alteration in structure or function. Hyperplastic disorders which can be diagnosed, prognosed, prevented, and/or treated with compositions of the invention (including polynucleotides, polypeptides, agonists or antagonists) include, but are not limited to, angiofollicular mediastinal lymph node hyperplasia, angiolymphoid hyperplasia with eosinophilia, atypical melanocytic hyperplasia, basal cell hyperplasia, benign giant lymph node hyperplasia, cementum hyperplasia, congenital adrenal hyperplasia, congenital sebaceous hyperplasia, cystic hyperplasia, cystic hyperplasia of the breast, denture hyperplasia, ductal hyperplasia, endometrial hyperplasia, fibromuscular hyperplasia, focal epithelial hyperplasia, gingival hyperplasia, inflammatory fibrous hyperplasia, inflammatory papillary hyperplasia, intravascular papillary endothelial hyperplasia, nodular hyperplasia of prostate, nodular regenerative hyperplasia, pseudoepitheliomatous hyperplasia, senile sebaceous hyperplasia, and verrucous hyperplasia.

[0626] Metaplasia is a form of controlled cell growth in which one type of adult or fully differentiated cell substitutes for another type of adult cell. Metaplastic disorders which can be diagnosed, prognosed, prevented, and/or treated with compositions of the invention (including polynucleotides, polypeptides, agonists or antagonists) include, but are not limited to, agnogenic myeloid metaplasia, apocrine metaplasia, atypical metaplasia, autoparenchymatous metaplasia, connective tissue metaplasia, epithelial metaplasia, intestinal metaplasia, metaplastic anemia, metaplastic ossification, metaplastic polyps, myeloid metaplasia, primary myeloid metaplasia, secondary myeloid metaplasia, squamous metaplasia, squamous metaplasia of amnion, and symptomatic myeloid metaplasia.

[0627] Dysplasia is frequently a forerunner of cancer, and is found mainly in the epithelia; it is the most disorderly form of non-neoplastic cell growth, involving a loss in individual cell uniformity and in the architectural orientation of cells. Dysplastic cells often have abnormally large, deeply stained nuclei, and exhibit pleomorphism. Dysplasia characteristically occurs where there exists chronic irritation or inflammation. Dysplastic disorders which can be diagnosed, prognosed, prevented, and/or treated with compositions of the invention (including polynucleotides, polypeptides, agonists or antagonists) include, but are not limited to, anhidrotic ectodermal dysplasia, anterofacial dysplasia, asphyxiating thoracic dysplasia, atriodigital dysplasia, bronchopulmonary dysplasia, cerebral dysplasia, cervical dysplasia, chondroectodermal dysplasia, cleidocranial dysplasia, congenital ectodermal dysplasia, craniodiaphysial dysplasia, craniocarpotarsal dysplasia, craniometaphysial dysplasia, dentin dysplasia, diaphysial dysplasia, ectodermal dysplasia, enamel dysplasia, encephalo-ophthalmic dysplasia, dysplasia epiphysialis hemimelia, dysplasia epiphysialis multiplex, dysplasia epiphysialis punctata, epithelial dysplasia, faciodigitogenital dysplasia, familial fibrous dysplasia of jaws, familial white folded dysplasia, fibromuscular dysplasia, fibrous dysplasia of bone, florid osseous dysplasia, hereditary renal-retinal dysplasia, hidrotic ectodermal dysplasia, hypohidrotic ectodermal dysplasia, lymphopenic thymic dysplasia, mammary dysplasia, mandibulofacial dysplasia, metaphysial dysplasia, Mondini dysplasia, monostotic fibrous dysplasia, mucoepithelial dysplasia, multiple epiphysial dysplasia, oculoauriculovertebral dysplasia, oculodentodigital dysplasia, oculovertebral dysplasia, odontogenic dysplasia, ophthalmomandibulomelic dysplasia, periapical cemental dysplasia, polyostotic fibrous dysplasia, pseudoachondroplastic spondyloepiphysial dysplasia, retinal dysplasia, septo-optic dysplasia, spondyloepiphysial dysplasia, and ventriculoradial dysplasia.

[0628] Additional pre-neoplastic disorders which can be diagnosed, prognosed, prevented, and/or treated with compositions of the invention (including polynucleotides, polypeptides, agonists or antagonists) include, but are not limited to, benign dysproliferative disorders (e.g., benign tumors, fibrocystic conditions, tissue hypertrophy, intestinal polyps, colon polyps, and esophageal dysplasia), leukoplakia, keratoses, Bowen's disease, Farmer's Skin, solar cheilitis, and solar keratosis.

[0629] In another embodiment, a polypeptide of the invention, or polynucleotides, antibodies, agonists, or antagonists corresponding to that polypeptide, may be used to diagnose and/or prognose hyperproliferative disorders associated with the tissue(s) in which the polypeptide of the invention is expressed, including one, two, three, four, five, or more tissues disclosed in Table 1A, column 7 (Tissue Distribution Library Code).

[0630] In another embodiment, a polypeptide of the invention, or polynucleotides, antibodies, agonists, oantntagonists corresponding to that polypeptide, may be used to diagnose and/or prognose disorders associated with the tissue(s) in which the polypeptide of the invention is expressed, including one, two, three, four, five, or more tissues disclosed in Table 1A, column 8 (Tissue Distribution Library Code).

[0631] In another embodiment, polynucleotides, polypeptides, antibodies, and/or agonists or antagonists of the present invention conjugated to a toxin or a radioactive isotope, as described herein, may be used to treat cancers and neoplasms, including, but not limited to those described herein. In a further preferred embodiment, polynucleotides, polypeptides, antibodies, and/or agonists or antagonists of the present invention conjugated to a toxin or a radioactive isotope, as described herein, may be used to treat acute myelogenous leukemia.

[0632] Additionally, polynucleotides, polypeptides, and/or agonists or antagonists of the invention may affect apoptosis, and therefore, would be useful in treating a number of diseases associated with increased cell survival or the inhibition of apoptosis. For example, diseases associated with increased cell survival or the inhibition of apoptosis that could be diagnosed, prognosed, prevented, and/or treated by polynucleotides, polypeptides, and/or agonists or antagonists of the invention, include cancers (such as follicular lymphomas, carcinomas with p53 mutations, and hormone-dependent tumors, including, but not limited to colon cancer, cardiac tumors, pancreatic cancer, melanoma, retinoblastoma, glioblastoma, lung cancer, intestinal cancer, testicular cancer, stomach cancer, neuroblastoma, myxoma, myoma, lymphoma, endothelioma, osteoblastoma, osteoclastoma, osteosarcoma, chondrosarcoma, adenoma, breast cancer, prostate cancer, Kaposi's sarcoma and ovarian cancer); autoimmune disorders such as, multiple sclerosis, Sjogren's syndrome, Hashimoto's thyroiditis, biliary cirrhosis, Behcet's disease, Crohn's disease, polymyositis, systemic lupus erythematosus and immune-related glomerulonephritis and rheumatoid arthritis) and viral infections (such as herpes viruses, pox viruses and adenoviruses), inflammation, graft v. host disease, acute graft rejection, and chronic graft rejection.

[0633] In preferred embodiments, polynucleotides, polypeptides, and/or agonists or antagonists of the invention are used to inhibit growth, progression, and/or metastasis of cancers, in particular those listed above.

[0634] Additional diseases or conditions associated with increased cell survival that could be diagnosed, prognosed, prevented, and/or treated by polynucleotides, polypeptides, and/or agonists or antagonists of the invention, include, but are not limited to, progression, and/or metastases of malignancies and related disorders such as leukemia (including acute leukemias (e.g., acute lymphocytic leukemia, acute myelocytic leukemia (including myeloblastic, promyelocytic, myelomonocytic, monocytic, and erythroleukemia)) and chronic leukemias (e.g., chronic myelocytic (granulocytic) leukemia and chronic lymphocytic leukemia)), polycythemia vera, lymphomas (e.g., Hodgkin's disease and non-Hodgkin's disease), multiple myeloma, Waldenstrom's macroglobulinemia, heavy chain disease, and solid tumors including, but not limited to, sarcomas and carcinomas such as fibrosarcoma, myxosarcoma, liposarcoma, chondrosarcoma, osteogenic sarcoma, chordoma, angiosarcoma, endotheliosarcoma, lymphangiosarcoma, lymphangioendotheliosarcoma, synovioma, mesothelioma, Ewing's tumor, leiomyosarcoma, rhabdomyosarcoma, colon carcinoma, pancreatic cancer, breast cancer, ovarian cancer, prostate cancer, squamous cell carcinoma, basal cell carcinoma, adenocarcinoma, sweat gland carcinoma, sebaceous gland carcinoma, papillary carcinoma, papillary adenocarcinomas, cystadenocarcinoma, medullary carcinoma, bronchogenic carcinoma, renal cell carcinoma, hepatoma, bile duct carcinoma, choriocarcinoma, seminoma, embryonal carcinoma, Wilm's tumor, cervical cancer, testicular tumor, lung carcinoma, small cell lung carcinoma, bladder carcinoma, epithelial carcinoma, glioma, astrocytoma, medulloblastoma, craniopharyngioma, ependymoma, pinealoma, emangioblastoma, acoustic neuroma, oligodendroglioma, menangioma, melanoma, neuroblastoma, and retinoblastoma.

[0635] Diseases associated with increased apoptosis that could be diagnosed, prognosed, prevented, and/or treated by polynucleotides, polypeptides, and/or agonists or antagonists of the invention, include AIDS; neurodegenerative disorders (such as Alzheimer's disease, Parkinson's disease, amyotrophic lateral sclerosis, retinitis pigmentosa, cerebellar degeneration and brain tumor or prior associated disease); autoimmune disorders (such as, multiple sclerosis, Sjogren's syndrome, Hashimoto's thyroiditis, biliary cirrhosis, Behcet's disease, Crohn's disease, polymyositis, systemic lupus erythematosus and immune-related glomerulonephritis and rheumatoid arthritis) myelodysplastic syndromes (such as aplastic anemia), graft v. host disease, ischemic injury (such as that caused by myocardial infarction, stroke and reperfusion injury), liver injury (e.g., hepatitis related liver injury, ischemia/reperfusion injury, cholestosis (bile duct injury) and liver cancer); toxin-induced liver disease (such as that caused by alcohol), septic shock, cachexia and anorexia.

[0636] Hyperproliferative diseases and/or disorders that could be diagnosed, prognosed, prevented, and/or treated by polynucleotides, polypeptides, and/or agonists or antagonists of the invention, include, but are not limited to, neoplasms located in the liver, abdomen, bone, breast, digestive system, pancreas, peritoneum, endocrine glands (adrenal, parathyroid, pituitary, testicles, ovary, thymus, thyroid), eye, head and neck, nervous system (central and peripheral), lymphatic system, pelvis, skin, soft tissue, spleen, thorax, and urogenital tract.

[0637] Similarly, other hyperproliferative disorders can also be diagnosed, prognosed, prevented, and/or treated by polynucleotides, polypeptides, and/or agonists or antagonists of the invention. Examples of such hyperproliferative disorders include, but are not limited to: hypergammaglobulinemia, lymphoproliferative disorders, paraproteinemias, purpura, sarcoidosis, Sezary Syndrome, Waldenstron's macroglobulinemia, Gaucher's Disease, histiocytosis, and any other hyperproliferative disease, besides neoplasia, located in an organ system listed above.

[0638] One preferred embodiment utilizes polynucleotides of the present invention to inhibit aberrant cellular division, by gene therapy using the present invention, and/or protein fusions or fragments thereof.

[0639] Thus, the present invention provides a method for treating cell proliferative diseases, disorders, and/or conditions by inserting into an abnormally proliferating cell a polynucleotide of the present invention, wherein said polynucleotide represses said cell proliferation, disease, disorder, and/or condition.

[0640] In a preferred embodiment, the present invention provides a method for treating cell proliferative diseases, disorders and/or conditions of the excretory system by inserting into a cell, a polynucleotide of the present invention, wherein said polynucleotide represses said cell proliferation, disease and/or disorder.

[0641] Another embodiment of the present invention provides a method of treating cell-proliferative diseases, disorders, and/or conditions in individuals comprising administration of one or more active gene copies of the present invention to an abnormally proliferating cell or cells. In a preferred embodiment, polynucleotides of the present invention is a DNA construct comprising a recombinant expression vector effective in expressing a DNA sequence encoding said polynucleotides. In another preferred embodiment of the present invention, the DNA construct encoding the polynucleotides of the present invention is inserted into cells to be treated utilizing a retrovirus, or more preferably an adenoviral vector (see, e.g., G J. Nabel, et. al., PNAS 96: 324-326 (1999), which is hereby incorporated by reference). In a most preferred embodiment, the viral vector is defective and will not transform non-proliferating cells, only proliferating cells. Moreover, in a preferred embodiment, the polynucleotides of the present invention inserted into proliferating cells either alone, or in combination with or fused to other polynucleotides, can then be modulated via an external stimulus (i.e., magnetic, specific small molecule, chemical, or drug administration, etc.), which acts upon the promoter upstream of said polynucleotides to induce expression of the encoded protein product. As such the beneficial therapeutic affect of the present invention may be expressly modulated (i.e., to increase, decrease, or inhibit expression of the present invention) based upon said external stimulus.

[0642] Polynucleotides of the present invention may be useful in repressing expression of oncogenic genes or antigens. By “repressing expression of the oncogenic genes” is intended the suppression of the transcription of the gene, the degradation of the gene transcript (pre-message RNA), the inhibition of splicing, the destruction of the messenger RNA, the prevention of the post-translational modifications of the protein, the destruction of the protein, or the inhibition of the normal function of the protein.

[0643] For local administration to abnormally proliferating cells, polynucleotides of the present invention may be administered by any method known to those of skill in the art including, but not limited to transfection, electroporation, microinjection of cells, or in vehicles such as liposomes, lipofectin, or as naked polynucleotides, or any other method described throughout the specification. The polynucleotide of the present invention may be delivered by known gene delivery systems such as, but not limited to, retroviral vectors (Gilboa, J. Virology 44:845 (1982); Hocke, Nature 320:275 (1986); Wilson, et al., Proc. Natl. Acad. Sci. U.S.A. 85:3014), vaccinia virus system (Chakrabarty et al., Mol. Cell Biol. 5:3403 (1985) or other efficient DNA delivery systems (Yates et al., Nature 313:812 (1985)) known to those skilled in the art. These references are exemplary only and are hereby incorporated by reference. In order to specifically deliver or transfect cells which are abnormally proliferating and spare non-dividing cells, it is preferable to utilize a retrovirus, or adenoviral (as described in the art and elsewhere herein) delivery system known to those of skill in the art. Since host DNA replication is required for retroviral DNA to integrate and the retrovirus will be unable to self replicate due to the lack of the retrovirus genes needed for its life cycle. Utilizing such a retroviral delivery system for polynucleotides of the present invention will target said gene and constructs to abnormally proliferating cells and will spare the non-dividing normal cells.

[0644] The polynucleotides of the present invention may be delivered directly to cell proliferative disorder/disease sites in internal organs, body cavities and the like by use of imaging devices used to guide an injecting needle directly to the disease site. The polynucleotides of the present invention may also be administered to disease sites at the time of surgical intervention.

[0645] By “cell proliferative disease” is meant any human or animal disease or disorder, affecting any one or any combination of organs, cavities, or body parts, which is characterized by single or multiple local abnormal proliferations of cells, groups of cells, or tissues, whether benign or malignant.

[0646] Any amount of the polynucleotides of the present invention may be administered as long as it has a biologically inhibiting effect on the proliferation of the treated cells. Moreover, it is possible to administer more than one of the polynucleotide of the present invention simultaneously to the same site. By “biologically inhibiting” is meant partial or total growth inhibition as well as decreases in the rate of proliferation or growth of the cells. The biologically inhibitory dose may be determined by assessing the effects of the polynucleotides of the present invention on target malignant or abnormally proliferating cell growth in tissue culture, tumor growth in animals and cell cultures, or any other method known to one of ordinary skill in the art.

[0647] The present invention is further directed to antibody-based therapies which involve administering of anti-polypeptides and anti-polynucleotide antibodies to a mammalian, preferably human, patient for treating one or more of the described diseases, disorders, and/or conditions. Methods for producing anti-polypeptides and anti-polynucleotide antibodies polyclonal and monoclonal antibodies are described in detail elsewhere herein. Such antibodies may be provided in pharmaceutically acceptable compositions as known in the art or as described herein.

[0648] A summary of the ways in which the antibodies of the present invention may be used therapeutically includes binding polynucleotides or polypeptides of the present invention locally or systemically in the body or by direct cytotoxicity of the antibody, e.g., as mediated by complement (CDC) or by effector cells (ADCC). Some of these approaches are described in more detail below. Armed with the teachings provided herein, one of ordinary skill in the art will know how to use the antibodies of the present invention for diagnostic, monitoring or therapeutic purposes without undue experimentation.

[0649] In particular, the antibodies, fragments and derivatives of the present invention are useful for treating a subject having or developing cell proliferative and/or differentiation diseases, disorders, and/or conditions as described herein. Such treatment comprises administering a single or multiple doses of the antibody, or a fragment, derivative, or a conjugate thereof.

[0650] The antibodies of this invention may be advantageously utilized in combination with other monoclonal or chimeric antibodies, or with lymphokines or hematopoietic growth factors, for example, which serve to increase the number or activity of effector cells which interact with the antibodies.

[0651] It is preferred to use high affinity and/or potent in vivo inhibiting and/or neutralizing antibodies against polypeptides or polynucleotides of the present invention, fragments or regions thereof, for both immunoassays directed to and therapy of diseases, disorders, and/or conditions related to polynucleotides or polypeptides, including fragments thereof, of the present invention. Such antibodies, fragments, or regions, will preferably have an affinity for polynucleotides or polypeptides, including fragments thereof. Preferred binding affinities include those with a dissociation constant or Kd less than 5×10⁻⁶M, 10⁻⁶M, 5×10⁻⁷M, 10⁻⁷M, 5×10⁻⁸M, 10⁻⁸M, 5×10⁻⁹M, 10⁻⁹M, 5×10⁻¹⁰M, 10⁻¹⁰M, 5×10⁻¹¹M, 10⁻¹¹M, 5×10⁻¹²M, 10⁻¹²M, 5×10⁻¹³M, 10⁻¹³M, 5×10⁻¹⁴M, 10⁻¹⁴M, 5×10⁻¹¹⁵M, and 10⁻¹⁵M.

[0652] Moreover, excretory system antigen polypeptides of the present invention or fragments thereof, are useful in inhibiting the angiogenesis of proliferative cells or tissues, either alone, as a protein fusion, or in combination with other polypeptides directly or indirectly, as described elsewhere herein. In a most preferred embodiment, said anti-angiogenesis effect may be achieved indirectly, for example, through the inhibition of hematopoietic, tumor-specific cells, such as tumor-associated macrophages (see, e.g., Joseph I B, et al. J Natl Cancer Inst, 90(21):1648-53 (1998), which is hereby incorporated by reference). Antibodies directed to polypeptides or polynucleotides of the present invention may also result in inhibition of angiogenesis directly, or indirectly (see, e.g., Witte L, et al., Cancer Metastasis Rev. 17(2):155-61 (1998), which is hereby incorporated by reference)).

[0653] Polypeptides, including protein fusions, of the present invention, or fragments thereof may be useful in inhibiting proliferative cells or tissues through the induction of apoptosis. Said polypeptides may act either directly, or indirectly to induce apoptosis of proliferative cells and tissues, for example in the activation of a death-domain receptor, such as tumor necrosis factor (TNF) receptor-1, CD95 (Fas/APO-1), TNF-receptor-related apoptosis-mediated protein (TRAMP) and TNF-related apoptosis-inducing ligand (TRAIL) receptor-1 and -2 (see, e.g., Schulze-Osthoff K, et.al., Eur J Biochem 254(3):439-59 (1998), which is hereby incorporated by reference). Moreover, in another preferred embodiment of the present invention, said polypeptides may induce apoptosis through other mechanisms, such as in the activation of other proteins which will activate apoptosis, or through stimulating the expression of said proteins, either alone or in combination with small molecule drugs or adjuvants, such as apoptonin, galectins, thioredoxins, antuinflammatory proteins (See for example, Mutat. Res. 400(1-2):447-55 (1998), Med Hypotheses.50(5):423-33 (1998), Chem. Biol. Interact. Apr 24;111-112:23-34(1998), J. Mo. Med. 76(6):402-12 (1998), Int. J. Tissue React. 20(1):3-15 (1998), which are all hereby incorporated by reference).

[0654] Polypeptides, including protein fusions to, or fragments thereof, of the present invention are useful in inhibiting the metastasis of proliferative cells or tissues. Inhibition may occur as a direct result of administering polypeptides, or antibodies directed to said polypeptides as described elsewhere herein, or indirectly, such as activating the expression of proteins known to inhibit metastasis, for example alpha 4 integrins, (See, e.g., Curr Top Microbiol Immunol 1998;231:125-41, which is hereby incorporated by reference). Such therapeutic affects of the present invention may be achieved either alone, or in combination with small molecule drugs or adjuvants.

[0655] In another embodiment, the invention provides a method of delivering compositions containing the polypeptides of the invention (e.g., compositions containing polypeptides or anti-excretory system antigen polypeptide antibodies associated with heterologous polypeptides, heterologous nucleic acids, toxins, or prodrugs) to targeted cells expressing the polypeptide of the present invention. excretory system antigen polypeptides or anti-excretory system antigen polypeptide antibodies of the invention may be associated with heterologous polypeptides, heterologous nucleic acids, toxins, or prodrugs via hydrophobic, hydrophilic, ionic and/or covalent interactions.

[0656] Polypeptides, protein fusions to, or fragments thereof, of the present invention are useful in enhancing the immunogenicity and/or antigenicity of proliferating cells or tissues, either directly, such as would occur if the polypeptides of the present invention ‘vaccinated’ the immune response to respond to proliferative antigens and immunogens, or indirectly, such as in activating the expression of proteins known to enhance the immune response (e.g. chemokines), to said antigens and immunogens.

[0657] Cardiovascular Disorders

[0658] Polynucleotides or polypeptides, or agonists or antagonists of the present invention, may be used to treat, prevent, diagnose, and/or prognose cardiovascular disorders, including, but not limited to, peripheral artery disease, such as limb ischemia.

[0659] Cardiovascular disorders include cardiovascular abnormalities, such as arterio-arterial fistula, arteriovenous fistula, cerebral arteriovenous malformations, congenital heart defects, pulmonary atresia, and Scimitar Syndrome. Congenital heart defects include aortic coarctation, cor triatriatum, coronary vessel anomalies, crisscross heart, dextrocardia, patent ductus arteriosus, Ebstein's anomaly, Eisenmenger complex, hypoplastic left heart syndrome, levocardia, tetralogy of fallot, transposition of great vessels, double outlet right ventricle, tricuspid atresia, persistent truncus arteriosus, total anomalous pulmonary venous connection, hypoplastic left heart syndrome, and heart septal defects, such as aortopulmonary septal defect, endocardial cushion defects, Lutembacher's Syndrome, atrioventricular canal defect, trilogy of Fallot, ventricular heart septal defects.

[0660] Cardiovascular disorders also include heart disease, such as arrhythmias, carcinoid heart disease, high cardiac output, low cardiac output, cardiac tamponade, endocarditis (including bacterial), heart aneurysm, cardiac arrest, sudden cardiac death, congestive heart failure, congestive cardiomyopathy, paroxysmal dyspnea, cardiac edema, heart hypertrophy, congestive cardiomyopathy, left ventricular hypertrophy, right ventricular hypertrophy, post-infarction heart rupture, ventricular septal rupture, heart valve diseases, myocardial diseases, myocardial ischemia, pericardial effusion, pericarditis (including constrictive and tuberculous), pneumopericardium, postpericardiotomy syndrome, pulmonary heart disease, rheumatic heart disease, ventricular dysfunction, hyperemia, cardiovascular pregnancy complications, Scimitar Syndrome, diastolic dysfunction, enlarged heart, heart block, J-curve phenomenon, rheumatic heart disease, Marfan syndrome, cardiovascular syphilis, and cardiovascular tuberculosis.

[0661] Arrhythmias include sinus arrhythmia, atrial fibrillation, atrial flutter, bradycardia, extrasystole, Adams-Stokes Syndrome, bundle-branch block, sinoatrial block, long QT syndrome, parasystole, Lown-Ganong-Levine Syndrome, Mahaim-type pre-excitation syndrome, Wolff-Parkinson-White syndrome, sick sinus syndrome, tachycardias, and ventricular fibrillation. Tachycardias include paroxysmal tachycardia, supraventricular tachycardia, accelerated idioventricular rhythm, atrioventricular nodal reentry tachycardia, ectopic atrial tachycardia, ectopic junctional tachycardia, sinoatrial nodal reentry tachycardia, sinus tachycardia, Torsades de Pointes, and ventricular tachycardia.

[0662] Heart valve disease include aortic valve insufficiency, aortic valve stenosis, heart murmurs, aortic valve prolapse, mitral valve prolapse, tricuspid valve prolapse, mitral valve insufficiency, mitral valve stenosis, pulmonary atresia, pulmonary valve insufficiency, pulmonary valve stenosis, tricuspid atresia, tricuspid valve insufficiency, tricuspid valve stenosis, and bicuspid aortic valve.

[0663] Myocardial diseases include alcoholic cardiomyopathy, congestive cardiomyopathy, hypertrophic cardiomyopathy, aortic subvalvular stenosis, pulmonary subvalvular stenosis, restrictive cardiomyopathy, Chagas cardiomyopathy, endocardial fibroelastosis, endomyocardial fibrosis, Kearns Syndrome, Barth syndrome, myocardial reperfilsion injury, and myocarditis.

[0664] Myocardial ischemias include coronary disease, such as angina pectoris, Prinzmetal's angina, unstable angina, coronary aneurysm, coronary arteriosclerosis, coronary thrombosis, coronary vasospasm, myocardial infarction and myocardial stunning.

[0665] Cardiovascular diseases also include vascular diseases such as aneurysms, angiodysplasia, angiomatosis, bacillary angiomatosis, Hippel-Lindau Disease, Klippel-Trenaunay-Weber Syndrome, Sturge-Weber Syndrome, angioneurotic edema, aortic diseases, Takayasu's Arteritis, aortitis, Leriche's Syndrome, arterial occlusive diseases, arteritis, enarteritis, polyarteritis nodosa, cerebrovascular disorders, diabetic angiopathies, diabetic retinopathy, embolisms, thrombosis, erythromelalgia, hemorrhoids, hepatic veno-occlusive disease, hypertension, hypotension (shock), ischemia, peripheral vascular diseases, phlebitis, superficial phlebitis, pulmonary veno-occlusive disease, chronic obstructive pulmonary disease, Buerger's disease, Raynaud's disease, CREST syndrome, retinal vein occlusion, Scimitar syndrome, superior vena cava syndrome, telangiectasia, atacia telangiectasia, hereditary hemorrhagic telangiectasia, deep vein thrombosis, varicocele, varicose veins, varicose ulcer, vasculitis, and venous insufficiency.

[0666] Aneurysms include dissecting aneurysms, false aneurysms, infected aneurysms, ruptured aneurysms, aortic aneurysms, cerebral aneurysms, coronary aneurysms, heart aneurysms, and iliac aneurysms.

[0667] Arterial occlusive diseases include arteriosclerosis, arteriolosclerosis, atherosclerosis, intermittent claudication, carotid stenosis, fibromuscular dysplasias, mesenteric vascular occlusion, Moyamoya disease, renal artery obstruction, retinal artery occlusion, and thromboanguitis obliterans.

[0668] Cerebrovascular disorders include carotid artery diseases, cerebral amyloid angiopathy, cerebral aneurysm, cerebral anoxia, cerebral arteriosclerosis, cerebral arteriovenous malformation, cerebral artery diseases, cerebral embolism and thrombosis, carotid artery thrombosis, sinus thrombosis, Wallenberg's syndrome, cerebral hemorrhage, epidural hematoma, subdural hematoma, subaraxhnoid hemorrhage, cerebral infarction, cerebral ischemia (including transient), subclavian steal syndrome, periventricular leukomalacia, vascular headache, cluster headache, migraine, and vertebrobasilar insufficiency.

[0669] Embolisms include air embolisms, amniotic fluid embolisms, cholesterol embolisms, blue toe syndrome, fat embolisms, pulmonary embolisms, and thromoboembolisms. Thrombosis include coronary thrombosis, hepatic vein thrombosis, deep vein thrombosis, retinal vein occlusion, carotid artery thrombosis, sinus thrombosis, Wallenberg's syndrome, and thrombophlebitis.

[0670] Ischemia includes cerebral ischemia, ischemic colitis, silent ischemia, compartment syndromes, anterior compartment syndrome, myocardial ischemia, reperfusion injuries, and peripheral limb ischemia. Vasculitis includes aortitis, arteritis, Behcet's Syndrome, Churg-Strauss Syndrome, mucocutaneous lymph node syndrome, thromboangittis obliterans, hypersensitivity vasculitis, Schoenlein-Henoch purpura, allergic cutaneous vasculitis, and Wegener's granulomatosis.

[0671] Cardiovascular diseases can also occur due to electrolyte imbalances that include, but are not limited to hyponatremia, hypernatremia, hypokalemia, hyperkalemia, hypocalcemia, hypercalcemia, hypophosphatemia, and hyperphophatemia. Neoplasm and/or cancers of the cardiovascular system include, but are not limited to, myxomas, fibromas, and rhabdomyomas.

[0672] Polypeptides may be administered using any method known in the art, including, but not limited to, direct needle injection at the delivery site, intravenous injection, topical administration, catheter infusion, biolistic injectors, particle accelerators, gelfoam sponge depots, other commercially available depot materials, osmotic pumps, oral or suppositorial solid pharmaceutical formulations, decanting or topical applications during surgery, aerosol delivery. Such methods are known in the art. Polypeptides may be administered as part of a Therapeutic, described in more detail below. Methods of delivering polynucleotides are described in more detail herein.

[0673] Respiratory Disorders

[0674] Polynucleotides or polypeptides, or agonists or antagonists of the present invention may be used to treat, prevent, diagnose, and/or prognose diseases and/or disorders of the respiratory system.

[0675] Diseases and disorders of the respiratory system include, but are not limited to, nasal vestibulitis, nonallergic rhinitis (e.g., acute rhinitis, chronic rhinitis, atrophic rhinitis, vasomotor rhinitis), nasal polyps, and sinusitis, juvenile angiofibromas, cancer of the nose and juvenile papillomas, vocal cord polyps, nodules (singer's nodules), contact ulcers, vocal cord paralysis, laryngoceles, pharyngitis (e.g., viral and bacterial), tonsillitis, tonsillar cellulitis, parapharyngeal abscess, laryngitis, laryngoceles, and throat cancers (e.g., cancer of the nasopharynx, tonsil cancer, larynx cancer), lung cancer (e.g., squamous cell carcinoma, small cell (oat cell) carcinoma, large cell carcinoma, and adenocarcinoma), allergic disorders (eosinophilic pneumonia, hypersensitivity pneumonitis (e.g., extrinsic allergic alveolitis, allergic interstitial pneumonitis, organic dust pneumoconiosis, allergic bronchopulmonary aspergillosis, asthma, Wegener's granulomatosis (granulomatous vasculitis), Goodpasture's syndrome)), pneumonia (e.g., bacterial pneumonia (e.g., Streptococcus pneumoniae (pneumoncoccal pneumonia), Staphylococcus aureus (staphylococcal pneumonia), Gram-negative bacterial pneumonia (caused by, e.g., Klebsiella and Pseudomas spp.), Mycoplasma pneumoniae pneumonia, Hemophilus influenzae pneumonia, Legionella pneumophila (Legionnaires' disease), and Chlamydia psittaci (Psittacosis)), and viral pneumonia (e.g., influenza, chickenpox (varicella).

[0676] Additional diseases and disorders of the respiratory system include, but are not limited to bronchiolitis, polio (poliomyelitis), croup, respiratory syncytial viral infection, mumps, erythema infectiosum (fifth disease), roseola infantum, progressive rubella panencephalitis, german measles, and subacute sclerosing panencephalitis), fungal pneumonia (e.g., Histoplasmosis, Coccidioidomycosis, Blastomycosis, fungal infections in people with severely suppressed immune systems (e.g., cryptococcosis, caused by Cryptococcus neoformans; aspergillosis, caused by Aspergillus spp.; candidiasis, caused by Candida; and mucormycosis)), Pneumocystis carinii (pneumocystis pneumonia), atypical pneumonias (e.g., Mycoplasma and Chlamydia spp.), opportunistic infection pneumonia, nosocomial pneumonia, chemical pneumonitis, and aspiration pneumonia, pleural disorders (e.g., pleurisy, pleural effusion, and pneumothorax (e.g., simple spontaneous pneumothorax, complicated spontaneous pneumothorax, tension pneumothorax)), obstructive airway diseases (e.g., asthma, chronic obstructive pulmonary disease (COPD), emphysema, chronic or acute bronchitis), occupational lung diseases (e.g., silicosis, black lung (coal workers' pneumoconiosis), asbestosis, berylliosis, occupational asthsma, byssinosis, and benign pneumoconioses), Infiltrative Lung Disease (e.g., pulmonary fibrosis (e.g., fibrosing alveolitis, usual interstitial pneumonia), idiopathic pulmonary fibrosis, desquamative interstitial pneumonia, lymphoid interstitial pneumonia, histiocytosis X (e.g., Letterer-Siwe disease, Hand-Schüiller-Christian disease, eosinophilic granuloma), idiopathic pulmonary hemosiderosis, sarcoidosis and pulmonary alveolar proteinosis), Acute respiratory distress syndrome (also called, e.g., adult respiratory distress syndrome), edema, pulmonary embolism, bronchitis (e.g., viral, bacterial), bronchiectasis, atelectasis, lung abscess (caused by, e.g., Staphylococcus aureus or Legionella pneumophila), and cystic fibrosis.

[0677] Anti-Angiotenesis Activity

[0678] The naturally occurring balance between endogenous stimulators and inhibitors of angiogenesis is one in which inhibitory influences predominate. Rastinejad et al., Cell 56:345-355 (1989). In those rare instances in which neovascularization occurs under normal physiological conditions, such as wound healing, organ regeneration, embryonic development, and female reproductive processes, angiogenesis is stringently regulated and spatially and temporally delimited. Under conditions of pathological angiogenesis such as that characterizing solid tumor growth, these regulatory controls fail. Unregulated angiogenesis becomes pathologic and sustains progression of many neoplastic and non-neoplastic diseases. A number of serious diseases are dominated by abnormal neovascularization including solid tumor growth and metastases, arthritis, some types of eye disorders, and psoriasis. See, e.g., reviews by Moses et al., Biotech. 9:630-634 (1991); Folkman et al., N. Engl. J Med., 333:1757-1763 (1995); Auerbach et al., J. Microvasc. Res. 29:401-411 (1985); Folkman, Advances in Cancer Research, eds. Klein and Weinhouse, Academic Press, New York, pp. 175-203 (1985); Patz, Am. J. Opthalmol. 94:715-743 (1982); and Folkman et al., Science 221:719-725 (1983). In a number of pathological conditions, the process of angiogenesis contributes to the disease state. For example, significant data have accumulated which suggest that the growth of solid tumors is dependent on angiogenesis. Folkman and Klagsbrun, Science 235:442-447 (1987).

[0679] The present invention provides for treatment of diseases or disorders associated with neovascularization by administration of the polynucleotides and/or polypeptides of the invention, as well as agonists or antagonists of the present invention. Malignant and metastatic conditions which can be treated with the polynucleotides and polypeptides, or agonists or antagonists of the invention include, but are not limited to, malignancies, solid tumors, and cancers described herein and otherwise known in the art (for a review of such disorders, see Fishman et al., Medicine, 2d Ed., J. B. Lippincott Co., Philadelphia (1985)). Thus, the present invention provides a method of treating an angiogenesis-related disease and/or disorder, comprising administration to an individual in need thereof a therapeutically effective amount of a polynucleotide, polypeptide, antagonist and/or agonist of the invention. For example, polynucleotides, polypeptides, antagonists and/or agonists may be utilized in a variety of additional methods in order to therapeutically treat a cancer or tumor. Cancers which may be treated with polynucleotides, polypeptides, antagonists and/or agonists include, but are not limited to solid tumors, including prostate, lung, breast, ovarian, stomach, pancreas, larynx, esophagus, testes, liver, parotid, biliary tract, colon, rectum, cervix, uterus, endometrium, kidney, bladder, thyroid cancer; primary tumors and metastases; melanomas; glioblastoma; Kaposi's sarcoma; leiomyosarcoma; non-small cell lung cancer; colorectal cancer; advanced malignancies; and blood born tumors such as leukemias. For example, polynucleotides, polypeptides, antagonists and/or agonists may be delivered topically, in order to treat cancers such as skin cancer, head and neck tumors, breast tumors, and Kaposi's sarcoma.

[0680] Within yet other aspects, polynucleotides, polypeptides, antagonists and/or agonists may be utilized to treat superficial forms of bladder cancer by, for example, intravesical administration. Polynucleotides, polypeptides, antagonists and/or agonists may be delivered directly into the tumor, or near the tumor site, via injection or a catheter. Of course, as the artisan of ordinary skill will appreciate, the appropriate mode of administration will vary according to the cancer to be treated. Other modes of delivery are discussed herein.

[0681] Polynucleotides, polypeptides, antagonists and/or agonists may be useful in treating other disorders, besides cancers, which involve angiogenesis. These disorders include, but are not limited to: benign tumors, for example hemangiomas, acoustic neuromas, neurofibromas, trachomas, and pyogenic granulomas; artheroscleric plaques; ocular angiogenic diseases, for example, diabetic retinopathy, retinopathy of prematurity, macular degeneration, corneal graft rejection, neovascular glaucoma, retrolental fibroplasia, rubeosis, retinoblastoma, uvietis and Pterygia (abnormal blood vessel growth) of the eye; rheumatoid arthritis; psoriasis; delayed wound healing; endometriosis; vasculogenesis; granulations; hypertrophic scars (keloids); nonunion fractures; scleroderma; trachoma; vascular adhesions; myocardial angiogenesis; coronary collaterals; cerebral collaterals; arteriovenous malformations; ischemic limb angiogenesis; Osler-Webber Syndrome; plaque neovascularization; telangiectasia; hemophiliac joints; angiofibroma; fibromuscular dysplasia; wound granulation; Crohn's disease; and atherosclerosis.

[0682] For example, within one aspect of the present invention methods are provided for treating hypertrophic scars and keloids, comprising the step of administering a polynucleotide, polypeptide, antagonist and/or agonist of the invention to a hypertrophic scar or keloid.

[0683] Within one embodiment of the present invention polynucleotides, polypeptides, antagonists and/or agonists of the invention are directly injected into a hypertrophic scar or keloid, in order to prevent the progression of these lesions. This therapy is of particular value in the prophylactic treatment of conditions which are known to result in the development of hypertrophic scars and keloids (e.g., burns), and is preferably initiated after the proliferative phase has had time to progress (approximately 14 days after the initial injury), but before hypertrophic scar or keloid development. As noted above, the present invention also provides methods for treating neovascular diseases of the eye, including for example, corneal neovascularization, neovascular glaucoma, proliferative diabetic retinopathy, retrolental fibroplasia and macular degeneration.

[0684] Moreover, ocular disorders associated with neovascularization which can be treated with the polynucleotides and polypeptides of the present invention (including agonists and/or antagonists) include, but are not limited to: neovascular glaucoma, diabetic retinopathy, retinoblastoma, retrolental fibroplasia, uveitis, retinopathy of prematurity macular degeneration, corneal graft neovascularization, as well as other eye inflammatory diseases, ocular tumors and diseases associated with choroidal or iris neovascularization. See, e.g., reviews by Waltman et al., Am. J. Ophthal. 85:704-710 (1978) and Gartner et al., Surv. Ophthal. 22:291-312 (1978).

[0685] Thus, within one aspect of the present invention methods are provided for treating neovascular diseases of the eye such as corneal neovascularization (including corneal graft neovascularization), comprising the step of administering to a patient a therapeutically effective amount of a compound (as described above) to the cornea, such that the formation of blood vessels is inhibited. Briefly, the cornea is a tissue, which normally lacks blood vessels. In certain pathological conditions however, capillaries may extend into the cornea from the pericorneal vascular plexus of the limbus. When the cornea becomes vascularized, it also becomes clouded, resulting in a decline in the patient's visual acuity. Visual loss may become complete if the cornea completely opacitates. A wide variety of disorders can result in corneal neovascularization, including for example, corneal infections (e.g., trachoma, herpes simplex keratitis, leishmaniasis and onchocerciasis), immunological processes (e.g., graft rejection and Stevens-Johnson's syndrome), alkali burns, trauma, inflammation (of any cause), toxic and nutritional deficiency states, and as a complication of wearing contact lenses.

[0686] Within particularly preferred embodiments of the invention, may be prepared for topical administration in saline (combined with any of the preservatives and antimicrobial agents commonly used in ocular preparations), and administered in eyedrop form. The solution or suspension may be prepared in its pure form and administered several times daily. Alternatively, anti-angiogenic compositions, prepared as described above, may also be administered directly to the cornea. Within preferred embodiments, the anti-angiogenic composition is prepared with a muco-adhesive polymer, which binds to cornea. Within further embodiments, the anti-angiogenic factors or anti-angiogenic compositions may be utilized as an adjunct to conventional steroid therapy. Topical therapy may also be useful prophylactically in comeal lesions which are known to have a high probability of inducing an angiogenic response (such as chemical bums). In these instances the treatment, likely in combination with steroids, may be instituted immediately to help prevent subsequent complications.

[0687] Within other embodiments, the compounds described above may be injected directly into the corneal stroma by an ophthalmologist under microscopic guidance. The preferred site of injection may vary with the morphology of the individual lesion, but the goal of the administration would be to place the composition at the advancing front of the vasculature (i.e., interspersed between the blood vessels and the normal cornea). In most cases this would involve perilimbic comeal injection to “protect” the cornea from the advancing blood vessels. This method may also be utilized shortly after a comeal insult in order to prophylactically prevent corneal neovascularization. In this situation, the material could be injected in the perilimbic cornea interspersed between the corneal lesion and its undesired potential limbic blood supply. Such methods may also be utilized in a similar fashion to prevent capillary invasion of transplanted corneas. In a sustained-release form, injections might only be required 2-3 times per year. A steroid could also be added to the injection solution to reduce inflammation resulting from the injection itself.

[0688] Within another aspect of the present invention, methods are provided for treating neovascular glaucoma, comprising the step of administering to a patient a therapeutically effective amount of a polynucleotide, polypeptide, antagonist and/or agonist to the eye, such that the formation of blood vessels is inhibited. In one embodiment, the compound may be administered topically to the eye in order to treat early forms of neovascular glaucoma. Within other embodiments, the compound may be implanted by injection into the region of the anterior chamber angle. Within other embodiments, the compound may also be placed in any location such that the compound is continuously released into the aqueous humor. Within another aspect of the present invention, methods are provided for treating proliferative diabetic retinopathy, comprising the step of administering to a patient a therapeutically effective amount of a polynucleotide, polypeptide, antagonist and/or agonist to the eyes, such that the formation of blood vessels is inhibited.

[0689] Within particularly preferred embodiments of the invention, proliferative diabetic retinopathy may be treated by injection into the aqueous humor or the vitreous, in order to increase the local concentration of the polynucleotide, polypeptide, antagonist and/or agonist in the retina. Preferably, this treatment should be initiated prior to the acquisition of severe disease requiring photocoagulation.

[0690] Within another aspect of the present invention, methods are provided for treating retrolental fibroplasia, comprising the step of administering to a patient a therapeutically effective amount of a polynucleotide, polypeptide, antagonist and/or agonist to the eye, such that the formation of blood vessels is inhibited. The compound may be administered topically, via intravitreous injection and/or via intraocular implants.

[0691] Additionally, disorders which can be treated with the polynucleotides, polypeptides, agonists and/or agonists include, but are not limited to, hemangioma, arthritis, psoriasis, angiofibroma, atherosclerotic plaques, delayed wound healing, granulations, hemophilic joints, hypertrophic scars, nonunion fractures, Osler-Weber syndrome, pyogenic granuloma, scleroderma, trachoma, and vascular adhesions.

[0692] Moreover, disorders and/or states, which can be treated, prevented, diagnosed and/or prognosed with the polynucleotides, polypeptides, agonists and/or agonists of the invention include, but are not limited to, solid tumors, blood born tumors such as leukemias, tumor metastasis, Kaposi's sarcoma, benign tumors, for example hemangiomas, acoustic neuromas, neurofibromas, trachomas, and pyogenic granulomas, rheumatoid arthritis, psoriasis, ocular angiogenic diseases, for example, diabetic retinopathy, retinopathy of prematurity, macular degeneration, corneal graft rejection, neovascular glaucoma, retrolental fibroplasia, rubeosis, retinoblastoma, and uvietis, delayed wound healing, endometriosis, vascluogenesis, granulations, hypertrophic scars (keloids), nonunion fractures, scleroderma, trachoma, vascular adhesions, myocardial angiogenesis, coronary collaterals, cerebral collaterals, arteriovenous malformations, ischemic limb angiogenesis, Osler-Webber Syndrome, plaque neovascularization, telangiectasia, hemophiliac joints, angiofibroma fibromuscular dysplasia, wound granulation, Crohn's disease, atherosclerosis, birth control agent by preventing vascularization required for embryo implantation controlling menstruation, diseases that have angiogenesis as a pathologic consequence such as cat scratch disease (Rochele minalia quintosa), ulcers (Helicobacter pylori), Bartonellosis and bacillary angiomatosis.

[0693] In one aspect of the birth control method, an amount of the compound sufficient to block embryo implantation is administered before or after intercourse and fertilization have occurred, thus providing an effective method of birth control, possibly a “morning after” method. Polynucleotides, polypeptides, agonists and/or agonists may also be used in controlling menstruation or administered as either a peritoneal lavage fluid or for peritoneal implantation in the treatment of endometriosis.

[0694] Polynucleotides, polypeptides, agonists and/or agonists of the present invention may be incorporated into surgical sutures in order to prevent stitch granulomas.

[0695] Polynucleotides, polypeptides, agonists and/or agonists may be utilized in a wide variety of surgical procedures. For example, within one aspect of the present invention a compositions (in the form of, for example, a spray or film) may be utilized to coat or spray an area prior to removal of a tumor, in order to isolate normal surrounding tissues from malignant tissue, and/or to prevent the spread of disease to surrounding tissues. Within other aspects of the present invention, compositions (e.g., in the form of a spray) may be delivered via endoscopic procedures in order to coat tumors, or inhibit angiogenesis in a desired locale. Within yet other aspects of the present invention, surgical meshes, which have been coated with anti-angiogenic compositions of the present invention may be utilized in any procedure wherein a surgical mesh might be utilized. For example, within one embodiment of the invention a surgical mesh laden with an anti-angiogenic composition may be utilized during abdominal cancer resection surgery (e.g., subsequent to colon resection) in order to provide support to the structure, and to release an amount of the anti-angiogenic factor.

[0696] Within further aspects of the present invention, methods are provided for treating tumor excision sites, comprising administering a polynucleotide, polypeptide, agonist and/or agonist to the resection margins of a tumor subsequent to excision, such that the local recurrence of cancer and the formation of new blood vessels at the site is inhibited. Within one embodiment of the invention, the anti-angiogenic compound is administered directly to the tumor excision site (e.g., applied by swabbing, brushing or otherwise coating the resection margins of the tumor with the anti-angiogenic compound). Alternatively, the anti-angiogenic compounds may be incorporated into known surgical pastes prior to administration. Within particularly preferred embodiments of the invention, the anti-angiogenic compounds are applied after hepatic resections for malignancy, and after neurosurgical operations.

[0697] Within one aspect of the present invention, polynucleotides, polypeptides, agonists and/or agonists may be administered to the resection margin of a wide variety of tumors, including for example, breast, colon, brain and hepatic tumors. For example, within one embodiment of the invention, anti-angiogenic compounds may be administered to the site of a neurological tumor subsequent to excision, such that the formation of new blood vessels at the site are inhibited.

[0698] The polynucleotides, polypeptides, agonists and/or agonists of the present invention may also be administered along with other anti-angiogenic factors. Representative examples of other anti-angiogenic factors include: Anti-Invasive Factor, retinoic acid and derivatives thereof, paclitaxel, Suramin, Tissue Inhibitor of Metalloproteinase-1, Tissue Inhibitor of Metalloproteinase-2, Plasminogen Activator Inhibitor-1, Plasminogen Activator Inhibitor-2, and various forms of the lighter “d group” transition metals.

[0699] Lighter “d group” transition metals include, for example, vanadium, molybdenum, tungsten, titanium, niobium, and tantalum species. Such transition metal species may form transition metal complexes. Suitable complexes of the above-mentioned transition metal species include oxo transition metal complexes.

[0700] Representative examples of vanadium complexes include oxo vanadium complexes such as vanadate and vanadyl complexes. Suitable vanadate complexes include metavanadate and orthovanadate complexes such as, for example, ammonium metavanadate, sodium metavanadate, and sodium orthovanadate. Suitable vanadyl complexes include, for example, vanadyl acetylacetonate and vanadyl sulfate including vanadyl sulfate hydrates such as vanadyl sulfate mono- and trihydrates.

[0701] Representative examples of tungsten and molybdenum complexes also include oxo complexes. Suitable oxo tungsten complexes include tungstate and tungsten oxide complexes. Suitable tungstate complexes include ammonium tungstate, calcium tungstate, sodium tungstate dihydrate, and tungstic acid. Suitable tungsten oxides include tungsten (IV) oxide and tungsten (VI) oxide. Suitable oxo molybdenum complexes include molybdate, molybdenum oxide, and molybdenyl complexes. Suitable molybdate complexes include ammonium molybdate and its hydrates, sodium molybdate and its hydrates, and potassium molybdate and its hydrates. Suitable molybdenum oxides include molybdenum (VI) oxide, molybdenum (VI) oxide, and molybdic acid. Suitable molybdenyl complexes include, for example, molybdenyl acetylacetonate. Other suitable tungsten and molybdenum complexes include hydroxo derivatives derived from, for example, glycerol, tartaric acid, and sugars.

[0702] A wide variety of other anti-angiogenic factors may also be utilized within the context of the present invention. Representative examples include platelet factor 4; protamine sulphate; sulphated chitin derivatives (prepared from queen crab shells), (Murata et al., Cancer Res. 51:22-26 (1991)); Sulphated Polysaccharide Peptidoglycan Complex (SP-PG) (the function of this compound may be enhanced by the presence of steroids such as estrogen, and tamoxifen citrate); Staurosporine; modulators of matrix metabolism, including for example, proline analogs, cishydroxyproline, d,L-3,4-dehydroproline, Thiaproline, alpha,alpha-dipyridyl, aminopropionitrile fumarate; 4-propyl-5-(4-pyridinyl)-2(3H)-oxazolone; Methotrexate; Mitoxantrone; Heparin; Interferons; 2 Macroglobulin-serum; ChIMP-3 (Pavloff et al., J. Bio. Chem. 267:17321-17326 (1992)); Chymostatin (Tomkinson et al., Biochem J. 286:475-480 (1992)); Cyclodextrin Tetradecasulfate; Eponemycin; Camptothecin; Fumagillin (Ingber et al., Nature 348:555-557 (1990)); Gold Sodium Thiomalate (“GST”; Matsubara and Ziff, J. Clin. Invest. 79:1440-1446 (1987)); anticollagenase-serum; alpha2-antiplasmin (Holmes et al., J. Biol. Chem. 262(4):1659-1664 (1987)); Bisantrene (National Cancer Institute); Lobenzarit disodium (N-(2)-carboxyphenyl-4-chloroanthronilic acid disodium or “CCA”; Takeuchi et al., Agents Actions 36:312-316, 1992); Thalidomide; Angostatic steroid; AGM-1470; carboxynaminolmidazole; and metalloproteinase inhibitors such as BB94.

[0703] Musculoskeletal System Disorders

[0704] Polynucleotides, polypeptides, antibodies, and/or agonists or antagonists of the present invention, may be used to treat, prevent, diagnose, and/or prognose disorders of the musculoskeletal system, including but not limited to, disorders of the bone, joints, ligaments, tendons, bursa, muscle, and/or neoplasms and cancers associated with musculoskeletal tissue.

[0705] Diseases or disorders of the bone include, but are not limited to, Albers-Schönberg disease, bowlegs, heel spurs, Köhler's bone disease, knock-knees,. Legg-Calvé-Perthes disease, Marfan's syndrome, mucopolysaccharidoses, Osgood-Schiatter disease, osteochondroses, osteochondrodysplasia, osteomyelitis, osteopetroses, osteoporosis (postmenopausal, senile, and juvenile), Paget's disease, Scheuermann's disease, scoliosis, Sever's disease, and patellofemoral stress syndrome.

[0706] Joint diseases or disorders include, but are not limited to, ankylosing spondylitis, Behcet's syndrome, CREST syndrome, Ehlers-Danlos syndrome, infectious arthritis, discoid lupus erythematosus, systemic lupus erythematosus, Lyme disease, osteoarthritis, psoriatic arthritis, relapsing polychondrites, Reiter's syndrome, rheumatoid arthritis (adult and juvenile), scleroderma, and Still's disease.

[0707] Diseases or disorders affecting ligaments, tendons, or bursa include, but are not limited to, ankle sprain, bursitis, posterior Achilles tendon bursitis (Haglund's deformity), anterior Achilles tendon bursitis (Albert's disease), tendinitis, tenosynovitis, poplieus tendinitis, Achilles tendinitis, medial or lateral epicondylitis, rotator cuff tendinitis, spasmodic torticollis, and fibromyalgia syndrome.

[0708] Muscle diseases or disorders include, but are not limited to, Becker's muscular dystrophy, Duchenne's muscular dystrophy, Landouzy-Dejerine muscular dystrophy, Leyden-Möbius muscular dystrophy, Erb's muscular dystrophy, Charcot's joints, dermatomyositis, gout, pseudogout, glycogen storage diseases, Pompe's disease, mitochondrial myopathy;, periodic paralysis, polymyalgia rheumatica, polymyositis, Steinert's disease, Thomsen's disease, anterolateral and posteromedial shin splints, posterior femoral muscle strain, and fibromyositis.

[0709] Musculoskeletal tissue may also develop cancers and/or neoplasms that include, but are not limited to, osteochondroma, benign chondroma, chondroblastoma, chondromyxoid fibroma, osteoid osteoma, giant cell tumor, multiple myeloma, osteosarcoma, fibrosarcoma, malignant fibrous histiocytoma, chondrosarcoma, Ewing's tumor, and malignant lymphoma of bone.

[0710] Neural Activity and Neuroloical Diseases

[0711] The polynucleotides, polypeptides and agonists or antagonists of the invention may be used for the diagnosis and/or treatment of diseases, disorders, damage or injury of the brain and/or nervous system. Nervous system disorders that can be treated with the compositions of the invention (e.g., polypeptides, polynucleotides, and/or agonists or antagonists), include, but are not limited to, nervous system injuries, and diseases or disorders which result in either a disconnection of axons, a diminution or degeneration of neurons, or demyelination. Nervous system lesions which may be treated in a patient (including human and non-human mammalian patients) according to the methods of the invention, include but are not limited to, the following lesions of either the central (including spinal cord, brain) or peripheral nervous systems: (1) ischemic lesions, in which a lack of oxygen in a portion of the nervous system results in neuronal injury or death, including cerebral infarction or ischemia, or spinal cord infarction or ischemia; (2) traumatic lesions, including lesions caused by physical injury or associated with surgery, for example, lesions which sever a portion of the nervous system, or compression injuries; (3) malignant lesions, in which a portion of the nervous system is destroyed or injured by malignant tissue which is either a nervous system associated malignancy or a malignancy derived from non-nervous system tissue; (4) infectious lesions, in which a portion of the nervous system is destroyed or injured as a result of infection, for example, by an abscess or associated with infection by human immunodeficiency virus, herpes zoster, or herpes simplex virus or with Lyme disease, tuberculosis, or syphilis; (5) degenerative lesions, in which a portion of the nervous system is destroyed or injured as a result of a degenerative process including but not limited to, degeneration associated with Parkinson's disease, Alzheimer's disease, Huntington's chorea, or amyotrophic lateral sclerosis (ALS); (6) lesions associated with nutritional diseases or disorders, in which a portion of the nervous system is destroyed or injured by a nutritional disorder or disorder of metabolism including, but not limited to, vitamin B12 deficiency, folic acid deficiency, Wernicke disease, tobacco-alcohol amblyopia, Marchiafava-Bignami disease (primary degeneration of the corpus callosum), and alcoholic cerebellar degeneration; (7) neurological lesions associated with systemic diseases including, but not limited to, diabetes (diabetic neuropathy, Bell's palsy), systemic lupus erythematosus, carcinoma, or sarcoidosis; (8) lesions caused by toxic substances including alcohol, lead, or particular neurotoxins; and (9) demyelinated lesions in which a portion of the nervous system is destroyed or injured by a demyelinating disease including, but not limited to, multiple sclerosis, human immunodeficiency virus-associated myelopathy, transverse myelopathy or various etiologies, progressive multifocal leukoencephalopathy, and central pontine myelinolysis.

[0712] In one embodiment, the polypeptides, polynucleotides, or agonists or antagonists of the invention are used to protect neural cells from the damaging effects of hypoxia. In a further preferred embodiment, the polypeptides, polynucleotides, or agonists or antagonists of the invention are used to protect neural cells from the damaging effects of cerebral hypoxia. According to this embodiment, the compositions of the invention are used to treat or prevent neural cell injury associated with cerebral hypoxia. In one non-exclusive aspect of this embodiment, the polypeptides, polynucleotides, or agonists or antagonists of the invention, are used to treat or prevent neural cell injury associated with cerebral ischemia. In another non-exclusive aspect of this embodiment, the polypeptides, polynucleotides, or agonists or antagonists of the invention are used to treat or prevent neural cell injury associated with cerebral infarction.

[0713] In another preferred embodiment, the polypeptides, polynucleotides, or agonists or antagonists of the invention are used to treat or prevent neural cell injury associated with a stroke. In a specific embodiment, the polypeptides, polynucleotides, or agonists or antagonists of the invention are used to treat or prevent cerebral neural cell injury associated with a stroke.

[0714] In another preferred embodiment, the polypeptides, polynucleotides, or agonists or antagonists of the invention are used to treat or prevent neural cell injury associated with a heart attack. In a specific embodiment, the polypeptides, polynucleotides, or agonists or antagonists of the invention are used to treat or prevent cerebral neural cell injury associated with a heart attack.

[0715] The compositions of the invention which are useful for treating or preventing a nervous system disorder may be selected by testing for biological activity in promoting the survival or differentiation of neurons. For example, and not by way of limitation, compositions of the invention which elicit any of the following effects may be useful according to the invention: (1) increased survival time of neurons in culture either in the presence or absence of hypoxia or hypoxic conditions; (2) increased sprouting of neurons in culture or in vivo; (3) increased production of a neuron-associated molecule in culture or in vivo, e.g., choline acetyltransferase or acetylcholinesterase with respect to motor neurons; or (4) decreased symptoms of neuron dysfunction in vivo. Such effects may be measured by any method known in the art. In preferred, non-limiting embodiments, increased survival of neurons may routinely be measured using a method set forth herein or otherwise known in the art, such as, for example, in Zhang et al., Proc Natl Acad Sci USA 97:3637-42 (2000) or in Arakawa et al., J. Neurosci., 10:3507-15 (1990); increased sprouting of neurons may be detected by methods known in the art, such as, for example, the methods set forth in Pestronk et al., Exp. Neurol., 70:65-82 (1980), or Brown et al., Ann. Rev. Neurosci., 4:17-42 (1981); increased production of neuron-associated molecules may be measured by bioassay, enzymatic assay, antibody binding, Northern blot assay, etc., using techniques known in the art and depending on the molecule to be measured; and motor neuron dysfunction may be measured by assessing the physical manifestation of motor neuron disorder, e.g., weakness, motor neuron conduction velocity, or functional disability.

[0716] In specific embodiments, motor neuron disorders that may be treated according to the invention include, but are not limited to, disorders such as infarction, infection, exposure to toxin, trauma, surgical damage, degenerative disease or malignancy that may affect motor neurons as well as other components of the nervous system, as well as disorders that selectively affect neurons such as amyotrophic lateral sclerosis, and including, but not limited to, progressive spinal muscular atrophy, progressive bulbar palsy, primary lateral sclerosis, infantile and Juvenile muscular atrophy, progressive bulbar paralysis of childhood (Fazio-Londe syndrome), poliomyelitis and the post polio syndrome, and Hereditary Motorsensory Neuropathy (Charcot-Marie-Tooth Disease).

[0717] Further, polypeptides or polynucleotides of the invention may play a role in neuronal survival; synapse formation; conductance; neural differentiation, etc. Thus, compositions of the invention (including polynucleotides, polypeptides, and agonists or antagonists) may be used to diagnose and/or treat or prevent diseases or disorders associated with these roles, including, but not limited to, learning and/or cognition disorders. The compositions of the invention may also be useful in the treatment or prevention of neurodegenerative disease states and/or behavioural disorders. Such neurodegenerative disease states and/or behavioral disorders include, but are not limited to, Alzheimer's Disease, Parkinson's Disease, Huntington's Disease, Tourette Syndrome, schizophrenia, mania, dementia, paranoia, obsessive compulsive disorder, panic disorder, learning disabilities, ALS, psychoses, autism, and altered behaviors, including disorders in feeding, sleep patterns, balance, and perception. In addition, compositions of the invention may also play a role in the treatment, prevention and/or detection of developmental disorders associated with the developing embryo, or sexually-linked disorders.

[0718] Additionally, polypeptides, polynucleotides and/or agonists or antagonists of the invention, may be useful in protecting neural cells from diseases, damage, disorders, or injury, associated with cerebrovascular disorders including, but not limited to, carotid artery diseases (e.g., carotid artery thrombosis, carotid stenosis, or Moyamoya Disease), cerebral amyloid angiopathy, cerebral aneurysm, cerebral anoxia, cerebral arteriosclerosis, cerebral arteriovenous malformations, cerebral artery diseases, cerebral embolism and thrombosis (e.g., carotid artery thrombosis, sinus thrombosis, or Wallenberg's Syndrome), cerebral hemorrhage (e.g., epidural or subdural hematoma, or subarachnoid hemorrhage), cerebral infarction, cerebral ischemia (e.g., transient cerebral ischemia, Subclavian Steal Syndrome, or vertebrobasilar insufficiency), vascular dementia (e.g., multi-infarct), leukomalacia, periventricular, and vascular headache (e.g., cluster headache or migraines).

[0719] In accordance with yet a further aspect of the present invention, there is provided a process for utilizing polynucleotides or polypeptides, as well as agonists or antagonists of the present invention, for therapeutic purposes, for example, to stimulate neurological cell proliferation and/or differentiation. Therefore, polynucleotides, polypeptides, agonists and/or antagonists of the invention may be used to treat and/or detect neurologic diseases. Moreover, polynucleotides or polypeptides, or agonists or antagonists of the invention, can be used as a marker or detector of a particular nervous system disease or disorder.

[0720] Examples of neurologic diseases which can be treated or detected with polynucleotides, polypeptides, agonists, and/or antagonists of the present invention include brain diseases, such as metabolic brain diseases which includes phenylketonuria such as maternal phenylketonuria, pyruvate carboxylase deficiency, pyruvate dehydrogenase complex deficiency, Wernicke's Encephalopathy, brain edema, brain neoplasms such as cerebellar neoplasms which include infratentorial neoplasms, cerebral ventricle neoplasms such as choroid plexus neoplasms, hypothalamic neoplasms, supratentorial neoplasms, canavan disease, cerebellar diseases such as cerebellar ataxia which include spinocerebellar degeneration such as ataxia telangiectasia, cerebellar dyssynergia, Friederich's Ataxia, Machado-Joseph Disease, olivopontocerebellar atrophy, cerebellar neoplasms such as infratentorial neoplasms, diffuse cerebral sclerosis such as encephalitis periaxialis, globoid cell leukodystrophy, metachromatic leukodystrophy and subacute sclerosing panencephalitis.

[0721] Additional neurologic diseases which can be treated or detected with polynucleotides, polypeptides, agonists, and/or antagonists of the present invention include cerebrovascular disorders (such as carotid artery diseases which include carotid artery thrombosis, carotid stenosis and Moyamoya Disease), cerebral amyloid angiopathy, cerebral aneurysm, cerebral anoxia, cerebral arteriosclerosis, cerebral arteriovenous malformations, cerebral artery diseases, cerebral embolism and thrombosis such as carotid artery thrombosis, sinus thrombosis and Wallenberg's Syndrome, cerebral hemorrhage such as epidural hematoma, subdural hematoma and subarachnoid hemorrhage, cerebral infarction, cerebral ischemia such as transient cerebral ischemia, Subclavian Steal Syndrome and vertebrobasilar insufficiency, vascular dementia such as multi-infarct dementia, periventricular leukomalacia, vascular headache such as cluster headache and migraine.

[0722] Additional neurologic diseases which can be treated or detected with polynucleotides, polypeptides, agonists, and/or antagonists of the present invention include dementia such as AIDS Dementia Complex, presenile dementia such as Alzheimer's Disease and Creutzfeldt-Jakob Syndrome, senile dementia such as Alzheimer's Disease and progressive supranuclear palsy, vascular dementia such as multi-infarct dementia, encephalitis which include encephalitis periaxialis, viral encephalitis such as epidemic encephalitis, Japanese Encephalitis, St. Louis Encephalitis, tick-borne encephalitis and West Nile Fever, acute disseminated encephalomyelitis, meningoencephalitis such as uveomeningoencephalitic syndrome, Postencephalitic Parkinson Disease and subacute sclerosing panencephalitis, encephalomalacia such as periventricular leukomalacia, epilepsy such as generalized epilepsy which includes infantile spasms, absence epilepsy, myoclonic epilepsy which includes MERRF Syndrome, tonic-clonic epilepsy, partial epilepsy such as complex partial epilepsy, frontal lobe epilepsy and temporal lobe epilepsy, post-traumatic epilepsy, status epilepticus such as Epilepsia Partialis Continua, and Hallervorden-Spatz Syndrome.

[0723] Additional neurologic diseases which can be treated or detected with polynucleotides, polypeptides, agonists, and/or antagonists of the present invention include hydrocephalus such as Dandy-Walker Syndrome and normal pressure hydrocephalus, hypothalamic diseases such as hypothalamic neoplasms, cerebral malaria, narcolepsy which includes cataplexy, bulbar poliomyelitis, cerebri pseudotumor, Rett Syndrome, Reye's Syndrome, thalamic diseases, cerebral toxoplasmosis, intracranial tuberculoma and Zellweger Syndrome, central nervous system infections such as AIDS Dementia Complex, Brain Abscess, subdural empyema, encephalomyelitis such as Equine Encephalomyelitis, Venezuelan Equine Encephalomyelitis, Necrotizing Hemorrhagic Encephalomyelitis, Visna, and cerebral malaria.

[0724] Additional neurologic diseases which can be treated or detected with polynucleotides, polypeptides, agonists, and/or antagonists of the present invention include meningitis such as arachnoiditis, aseptic meningtitis such as viral meningtitis which includes lymphocytic choriomeningitis, Bacterial meningtitis which includes Haemophilus Meningtitis, Listeria Meningtitis, Meningococcal Meningtitis such as Waterhouse-Friderichsen Syndrome, Pneumococcal Meningtitis and meningeal tuberculosis, fungal meningitis such as Cryptococcal Meningtitis, subdural effusion, meningoencephalitis such as uvemeningoencephalitic syndrome, myelitis such as transverse myelitis, neurosyphilis such as tabes dorsalis, poliomyelitis which includes bulbar poliomyelitis and postpoliomyelitis syndrome, prion diseases (such as Creutzfeldt-Jakob Syndrome, Bovine Spongiform Encephalopathy, Gerstmann-Straussler Syndrome, Kuru, Scrapie), and cerebral toxoplasmosis.

[0725] Additional neurologic diseases which can be treated or detected with polynucleotides, polypeptides, agonists, and/or antagonists of the present invention include central nervous system neoplasms such as brain neoplasms that include cerebellar neoplasms such as infratentorial neoplasms, cerebral ventricle neoplasms such as choroid plexus neoplasms, hypothalamic neoplasms and supratentorial neoplasms, meningeal neoplasms, spinal cord neoplasms which include epidural neoplasms, demyelinating diseases such as Canavan Diseases, diffuse cerebral sceloris which includes adrenoleukodystrophy, encephalitis periaxialis, globoid cell leukodystrophy, diffuse cerebral sclerosis such as metachromatic leukodystrophy, allergic encephalomyelitis, necrotizing hemorrhagic encephalomyelitis, progressive multifocal leukoencephalopathy, multiple sclerosis, central pontine myelinolysis, transverse myelitis, neuromyelitis optica, Scrapie, Swayback, Chronic Fatigue Syndrome, Visna, High Pressure Nervous Syndrome, Meningism, spinal cord diseases such as amyotonia congenita, amyotrophic lateral sclerosis, spinal muscular atrophy such as Werdnig-Hoffmann Disease, spinal cord compression, spinal cord neoplasms such as epidural neoplasms, syringomyelia, Tabes Dorsalis, Stiff-Man Syndrome, mental retardation such as Angelman Syndrome, Cri-du-Chat Syndrome, De Lange's Syndrome, Down Syndrome, Gangliosidoses such as gangliosidoses G(M1), Sandhoff Disease, Tay-Sachs Disease, Hartnup Disease, homocystinuria, Laurence-Moon-Biedl Syndrome, Lesch-Nyhan Syndrome, Maple Syrup Urine Disease, mucolipidosis such as fucosidosis, neuronal ceroid-lipofuscinosis, oculocerebrorenal syndrome, phenylketonuria such as maternal phenylketonuria, Prader-Willi Syndrome, Rett Syndrome, Rubinstein-Taybi Syndrome, Tuberous Sclerosis, WAGR Syndrome, nervous system abnormalities such as holoprosencephaly, neural tube defects such as anencephaly which includes hydrangencephaly, Arnold-Chairi Deformity, encephalocele, meningocele, meningomyelocele, spinal dysraphism such as spina bifida cystica and spina bifida occulta.

[0726] Additional neurologic diseases which can be treated or detected with polynucleotides, polypeptides, agonists, and/or antagonists of the present invention include hereditary motor and sensory neuropathies which include Charcot-Marie Disease, Hereditary optic atrophy, Refsum's Disease, hereditary spastic paraplegia, Werdnig-Hoffmann Disease, Hereditary Sensory and Autonomic Neuropathies such as Congenital Analgesia and Familial Dysautonomia, Neurologic manifestations (such as agnosia that include Gerstmann's Syndrome, Amnesia such as retrograde amnesia, apraxia, neurogenic bladder, cataplexy, communicative disorders such as hearing disorders that includes deafness, partial hearing loss, loudness recruitment and tinnitus, language disorders such as aphasia which include agraphia, anomia, broca aphasia, and Wernicke Aphasia, Dyslexia such as Acquired Dyslexia, language development disorders, speech disorders such as aphasia which includes anomia, broca aphasia and Wernicke Aphasia, articulation disorders, communicative disorders such as speech disorders which include dysarthria, echolalia, mutism and stuttering, voice disorders such as aphonia and hoarseness, decerebrate state, delirium, fasciculation, hallucinations, meningism, movement disorders such as angelman syndrome, ataxia, athetosis, chorea, dystonia, hypokinesia, muscle hypotonia, myoclonus, tic, torticollis and tremor, muscle hypertonia such as muscle rigidity such as stiff-man syndrome, muscle spasticity, paralysis such as facial paralysis which includes Herpes Zoster Oticus, Gastroparesis, Hemiplegia, ophthalmoplegia such as diplopia, Duane's Syndrome, Horner's Syndrome, Chronic progressive external ophthalmoplegia such as Kearns Syndrome, Bulbar Paralysis, Tropical Spastic Paraparesis, Paraplegia such as Brown-Sequard Syndrome, quadriplegia, respiratory paralysis and vocal cord paralysis, paresis, phantom limb, taste disorders such as ageusia and dysgeusia, vision disorders such as amblyopia, blindness, color vision defects, diplopia, hemianopsia, scotoma and subnormal vision, sleep disorders such as hypersomnia which includes Kleine-Levin Syndrome, insomnia, and somnambulism, spasm such as trismus, unconsciousness such as coma, persistent vegetative state and syncope and vertigo, neuromuscular diseases such as amyotonia congenita, amyotrophic lateral sclerosis, Lambert-Eaton Myasthenic Syndrome, motor neuron disease, muscular atrophy such as spinal muscular atrophy, Charcot-Marie Disease and Werdnig-Hoffmann Disease, Postpoliomyelitis Syndrome, Muscular Dystrophy, Myasthenia Gravis, Myotonia Atrophica, Myotonia Confenita, Nemaline Myopathy, Familial Periodic Paralysis, Multiplex Paramyloclonus, Tropical Spastic Paraparesis and Stiff-Man Syndrome, peripheral nervous system diseases such as acrodynia, amyloid neuropathies, autonomic nervous system diseases such as Adie's Syndrome, Barre-Lieou Syndrome, Familial Dysautonomia, Homer's Syndrome, Reflex Sympathetic Dystrophy and Shy-Drager Syndrome, Cranial Nerve Diseases such as Acoustic Nerve Diseases such as Acoustic Neuroma which includes Neurofibromatosis 2, Facial Nerve Diseases such as Facial Neuralgia,Melkersson-Rosenthal Syndrome, ocular motility disorders which includes amblyopia, nystagmus, oculomotor nerve paralysis, ophthalmoplegia such as Duane's Syndrome, Horner's Syndrome, Chronic Progressive External Ophthalmoplegia which includes Kearns Syndrome, Strabismus such as Esotropia and Exotropia, Oculomotor Nerve Paralysis, Optic Nerve Diseases such as Optic Atrophy which includes Hereditary Optic Atrophy, Optic Disk Drusen, Optic Neuritis such as Neuromyelitis Optica, Papilledema, Trigeminal Neuralgia, Vocal Cord Paralysis, Demyelinating Diseases such as Neuromyelitis Optica and Swayback, and Diabetic neuropathies such as diabetic foot.

[0727] Additional neurologic diseases which can be treated or detected with polynucleotides, polypeptides, agonists, and/or antagonists of the present invention include nerve compression syndromes such as carpal tunnel syndrome, tarsal tunnel syndrome, thoracic outlet syndrome such as cervical rib syndrome, ulnar nerve compression syndrome, neuralgia such as causalgia, cervico-brachial neuralgia, facial neuralgia and trigeminal neuralgia, neuritis such as experimental allergic neuritis, optic neuritis, polyneuritis, polyradiculoneuritis and radiculities such as polyradiculitis, hereditary motor and sensory neuropathies such as Charcot-Marie Disease, Hereditary Optic Atrophy, Refsum's Disease, Hereditary Spastic Paraplegia and Werdnig-Hoffmann Disease, Hereditary Sensory and Autonomic Neuropathies which include Congenital Analgesia and Familial Dysautonomia, POEMS Syndrome, Sciatica, Gustatory Sweating and Tetany).

[0728] Endocrine Disorders

[0729] Polynucleotides or polypeptides, or agonists or antagonists of the present invention, may be used to treat, prevent, diagnose, and/or prognose disorders and/or diseases related to hormone imbalance, and/or disorders or diseases of the endocrine system.

[0730] Hormones secreted by the glands of the endocrine system control physical growth, sexual function, metabolism, and other functions. Disorders may be classified in two ways: disturbances in the production of hormones, and the inability of tissues to respond to hormones. The etiology of these hormone imbalance or endocrine system diseases, disorders or conditions may be genetic, somatic, such as cancer and some autoimmune diseases, acquired (e.g., by chemotherapy, injury or toxins), or infectious. Moreover, polynucleotides, polypeptides, antibodies, and/or agonists or antagonists of the present invention can be used as a marker or detector of a particular disease or disorder related to the endocrine system and/or hormone imbalance.

[0731] Endocrine system and/or hormone imbalance and/or diseases encompass disorders of uterine motility including, but not limited to: complications with pregnancy and labor (e.g., pre-term labor, post-term pregnancy, spontaneous abortion, and slow or stopped labor); and disorders and/or diseases of the menstrual cycle (e.g., dysmenorrhea and endometriosis).

[0732] Endocrine system and/or hormone imbalance disorders and/or diseases include disorders and/or diseases of the pancreas, such as, for example, diabetes mellitus, diabetes insipidus, congenital pancreatic agenesis, pheochromocytoma—islet cell tumor syndrome; disorders and/or diseases of the adrenal glands such as, for example, Addison's Disease, corticosteroid deficiency, virilizing disease, hirsutism, Cushing's Syndrome, hyperaldosteronism, pheochromocytoma; disorders and/or diseases of the pituitary gland, such as, for example, hyperpituitarism, hypopituitarism, pituitary dwarfism, pituitary adenoma, panhypopituitarism, acromegaly, gigantism; disorders and/or diseases of the thyroid, including but not limited to, hyperthyroidism, hypothyroidism, Plummer's disease, Graves' disease (toxic diffuse goiter), toxic nodular goiter, thyroiditis (Hashimoto's thyroiditis, subacute granulomatous thyroiditis, and silent lymphocytic thyroiditis), Pendred's syndrome, myxedema, cretinism, thyrotoxicosis, thyroid hormone coupling defect, thymic aplasia, Hurthle cell tumours of the thyroid, thyroid cancer, thyroid carcinoma, Medullary thyroid carcinoma; disorders and/or diseases of the parathyroid, such as, for example, hyperparathyroidism, hypoparathyroidism; disorders and/or diseases of the hypothalamus.

[0733] In addition, endocrine system and/or hormone imbalance disorders and/or diseases may also include disorders and/or diseases of the testes or ovaries, including cancer. Other disorders and/or diseases of the testes or ovaries further include, for example, ovarian cancer, polycystic ovary syndrome, Klinefelter's syndrome, vanishing testes syndrome (bilateral anorchia), congenital absence of Leydig's cells, cryptorchidism, Noonan's syndrome, myotonic dystrophy, capillary haemangioma of the testis (benign), neoplasias of the testis and neo-testis.

[0734] Moreover, endocrine system and/or hormone imbalance disorders and/or diseases may also include disorders and/or diseases such as, for example, polyglandular deficiency syndromes, pheochromocytoma, neuroblastoma, multiple Endocrine neoplasia, and disorders and/or cancers of endocrine tissues.

[0735] In certain embodiments, a polypeptide of the invention, or polynucleotides, antibodies, agonists, or antagonists corresponding to that polypeptide, may be used to diagnose and/or prognose endocrine diseases and/or disorders associated with the tissue(s) in which the polypeptide of the invention is expressed, including one, two, three, four, five, or more tissues disclosed in Table 1A, column 7 (Tissue Distribution Library Code).

[0736] Gastrointestinal Disorders

[0737] Polynucleotides or polypeptides, or agonists or antagonists of the present invention, may be used to treat, prevent, diagnose, and/or prognose gastrointestinal disorders, including inflammatory diseases and/or conditions, infections, cancers (e.g., intestinal neoplasms (carcinoid tumor of the small intestine, non-Hodgkin's lymphoma of the small intestine, small bowl lymphoma)), and ulcers, such as peptic ulcers.

[0738] Gastrointestinal disorders include dysphagia, odynophagia, inflammation of the esophagus, peptic esophagitis, gastric reflux, submucosal fibrosis and stricturing, Mallory-Weiss lesions, leiomyomas, lipomas, epidermal cancers, adeoncarcinomas, gastric retention disorders, gastroenteritis, gastric atrophy, gastric/stomach cancers, polyps of the stomach, autoimmune disorders such as pernicious anemia, pyloric stenosis, gastritis (bacterial, viral, eosinophilic, stress-induced, chronic erosive, atrophic, plasma cell, and Menetrier's), and peritoneal diseases (e.g., chyloperioneum, hemoperitoneum, mesenteric cyst, mesenteric lymphadenitis, mesenteric vascular occlusion, panniculitis, neoplasms, peritonitis, pneumoperitoneum, bubphrenic abscess).

[0739] Gastrointestinal disorders also include disorders associated with the small intestine, such as malabsorption syndromes, distension, irritable bowel syndrome, sugar intolerance, celiac disease, duodenal ulcers, duodenitis, tropical sprue, Whipple's disease, intestinal lymphangiectasia, Crohn's disease, appendicitis, obstructions of the ileum, Meckel's diverticulum, multiple diverticula, failure of complete rotation of the small and large intestine, lymphoma, and bacterial and parasitic diseases (such as Traveler's diarrhea, typhoid and paratyphoid, cholera, infection by Roundworms (Ascariasis lumbricoides), Hookworms (Ancylostoma duodenale), Threadwonns (Enterobius vermicularis), Tapeworms (Taenia saginata, Echinococcus granulosus, Diphyllobothrium spp., and T. solium).

[0740] Liver diseases and/or disorders include intrahepatic cholestasis (alagille syndrome, binary liver cirrhosis), fatty liver (alcoholic fatty liver, reye syndrome), hepatic vein thrombosis, hepatolentricular degeneration, hepatomegaly, hepatopulmonary syndrome, hepatorenal syndrome, portal hypertension (esophageal and gastric varices), liver abscess (amebic liver abscess), liver cirrhosis (alcoholic, biliary and experimental), alcoholic liver diseases (fatty liver, hepatitis, cirrhosis), parasitic (hepatic echinococcosis, fascioliasis, amebic liver abscess), jaundice (hemolytic, hepatocellular, and cholestatic), cholestasis, portal hypertension, liver enlargement, ascites, hepatitis (alcoholic hepatitis, animal hepatitis, chronic hepatitis (autoimmune, hepatitis B, hepatitis C, hepatitis D, drug induced), toxic hepatitis, viral human hepatitis (hepatitis A, hepatitis B, hepatitis C, hepatitis D, hepatitis E), Wilson's disease, granulomatous hepatitis, secondary biliary cirrhosis, hepatic encephalopathy, portal hypertension, varices, hepatic encephalopathy, primary biliary cirrhosis, primary sclerosing cholangitis, hepatocellular adenoma, hemangiomas, bile stones, liver failure (hepatic encephalopathy, acute liver failure), and liver neoplasms (angiomyolipoma, calcified liver metastases, cystic liver metastases, epithelial tumors, fibrolamellar hepatocarcinoma, focal nodular hyperplasia, hepatic adenoma, hepatobiliary cystadenoma, hepatoblastoma, hepatocellular carcinoma, hepatoma, liver cancer, liver hemangioendothelioma, mesenchymal hamartoma, mesenchymal tumors of liver, nodular regenerative hyperplasia, benign liver tumors (Hepatic cysts [Simple cysts, Polycystic liver disease, Hepatobiliary cystadenoma, Choledochal cyst], Mesenchymal tumors [Mesenchymal hamartoma, Infantile hemangioendothelioma, Hemangioma, Peliosis hepatis, Lipomas, Inflammatory pseudotumor, Miscellaneous], Epithelial tumors [Bile duct epithelium (Bile duct hamartoma, Bile duct adenoma), Hepatocyte (Adenoma, Focal nodular hyperplasia, Nodular regenerative hyperplasia)], malignant liver tumors [hepatocellular, hepatoblastoma, hepatocellular carcinoma, cholangiocellular, cholangiocarcinoma, cystadenocarcinoma, tumors of blood vessels, angiosarcoma, Karposi's sarcoma, hemangioendothelioma, other tumors, embryonal sarcoma, fibrosarcoma, leiomyosarcoma, rhabdomyosarcoma, carcinosarcoma, teratoma, carcinoid, squamous carcinoma, primary lymphoma]), peliosis hepatis, erythrohepatic porphyria, hepatic porphyria (acute intermittent porphyria, porphyria cutanea tarda), Zellweger syndrome).

[0741] Pancreatic diseases and/or disorders include acute pancreatitis, chronic pancreatitis (acute necrotizing pancreatitis, alcoholic pancreatitis), neoplasms (adenocarcinoma of the pancreas, cystadenocarcinoma, insulinoma, gastrinoma, and glucagonoma, cystic neoplasms, islet-cell tumors, pancreoblastoma), and other pancreatic diseases (e.g., cystic fibrosis, cyst (pancreatic pseudocyst, pancreatic fistula, insufficiency)).

[0742] Gallbladder diseases include gallstones (cholelithiasis and choledocholithiasis), postcholecystectomy syndrome, diverticulosis of the gallbladder, acute cholecystitis, chronic cholecystitis, bile duct tumors, and mucocele.

[0743] Diseases and/or disorders of the large intestine include antibiotic-associated colitis, diverticulitis, ulcerative colitis, acquired megacolon, abscesses, fungal and bacterial infections, anorectal disorders (e.g., fissures, hemorrhoids), colonic diseases (colitis, colonic neoplasms [colon cancer, adenomatous colon polyps (e.g., villous adenoma), colon carcinoma, colorectal cancer], colonic diverticulitis, colonic diverticulosis, megacolon [Hirschsprung disease, toxic megacolon]; sigmoid diseases [proctocolitis, sigmoin neoplasms]), constipation, Crohn's disease, diarrhea (infantile diarrhea, dysentery), duodenal diseases (duodenal neoplasms, duodenal obstruction, duodenal ulcer, duodenitis), enteritis (enterocolitis), HIV enteropathy, ileal diseases (ileal neoplasms, ileitis), immunoproliferative small intestinal disease, inflammatory bowel disease (ulcerative colitis, Crohn's disease), intestinal atresia, parasitic diseases (anisakiasis, balantidiasis, blastocystis infections, cryptosporidiosis, dientamoebiasis, amebic dysentery, giardiasis), intestinal fistula (rectal fistula), intestinal neoplasms (cecal neoplasms, colonic neoplasms, duodenal neoplasms, ileal neoplasms, intestinal polyps, jejunal neoplasms, rectal neoplasms), intestinal obstruction (afferent loop syndrome, duodenal obstruction, impacted feces, intestinal pseudo-obstruction [cecal volvulus], intussusception), intestinal perforation, intestinal polyps (colonic polyps, gardner syndrome, peutz-jeghers syndrome), jejunal diseases (ejunal neoplasms), malabsorption syndromes (blind loop syndrome, celiac disease, lactose intolerance, short bowl syndrome, tropical sprue, whipple's disease), mesenteric vascular occlusion, pneumatosis cystoides intestinalis, protein-losing enteropathies (intestinal lymphagiectasis), rectal diseases (anus diseases, fecal incontinence, hemorrhoids, proctitis, rectal fistula, rectal prolapse, rectocele), peptic ulcer (duodenal ulcer, peptic esophagitis, hemorrhage, perforation, stomach ulcer, Zollinger-Ellison syndrome), postgastrectomy syndromes (dumping syndrome), stomach diseases (e.g., achlorhydria, duodenogastric reflux (bile reflux), gastric antral vascular ectasia, gastric fistula, gastric outlet obstruction, gastritis (atrophic or hypertrophic), gastroparesis, stomach dilatation, stomach diverticulum, stomach neoplasms (gastric cancer, gastric polyps, gastric adenocarcinoma, hyperplastic gastric polyp), stomach rupture, stomach ulcer, stomach volvulus), tuberculosis, visceroptosis, vomiting (e.g., hematemesis, hyperemesis gravidarum, postoperative nausea and vomiting) and hemorrhagic colitis.

[0744] Further diseases and/or disorders of the gastrointestinal system include biliary tract diseases, such as, gastroschisis, fistula (e.g., biliary fistula, esophageal fistula, gastric fistula, intestinal fistula, pancreatic fistula), neoplasms (e.g., biliary tract neoplasms, esophageal neoplasms, such as adenocarcinoma of the esophagus, esophageal squamous cell carcinoma, gastrointestinal neoplasms, pancreatic neoplasms, such as adenocarcinoma of the pancreas, mucinous cystic neoplasm of the pancreas, pancreatic cystic neoplasms, pancreatoblastoma, and peritoneal neoplasms), esophageal disease (e.g., bullous diseases, candidiasis, glycogenic acanthosis, ulceration, barrett esophagus varices, atresia, cyst, diverticulum (e.g., Zenker's diverticulum), fistula (e.g., tracheoesophageal fistula), motility disorders (e.g., CREST syndrome, deglutition disorders, achalasia, spasm, gastroesophageal reflux), neoplasms, perforation (e.g., Boerhaave syndrome, Mallory-Weiss syndrome), stenosis, esophagitis, diaphragmatic hernia (e.g., hiatal hernia); gastrointestinal diseases, such as, gastroenteritis (e.g., cholera morbus, norwalk virus infection), hemorrhage (e.g., hematemesis, melena, peptic ulcer hemorrhage), stomach neoplasms (gastric cancer, gastric polyps, gastric adenocarcinoma, stomach cancer)), hernia (e.g., congenital diaphragmatic hernia, femoral hernia, inguinal hernia, obturator hernia, umbilical hernia, ventral hernia), and intestinal diseases (e.g., cecal diseases (appendicitis, cecal neoplasms)).

[0745] Reproductive System Disorders

[0746] The polynucleotides or polypeptides, or agonists or antagonists of the invention may be used for the diagnosis, treatment, or prevention of diseases and/or disorders of the reproductive system. Reproductive system disorders that can be treated by the compositions of the invention, include, but are not limited to, reproductive system injuries, infections, neoplastic disorders, congenital defects, and diseases or disorders which result in infertility, complications with pregnancy, labor, or parturition, and postpartum difficulties.

[0747] Reproductive system disorders and/or diseases include diseases and/or disorders of the testes, including, but not limited to, testicular atrophy, testicular feminization, cryptorchism (unilateral and bilateral), anorchia, ectopic testis, epididymitis and orchitis (typically resulting from infections such as, for example, gonorrhea, mumps, tuberculosis, and syphilis), testicular torsion, vasitis nodosa, germ cell tumors (e.g., seminomas, embryonal cell carcinomas, teratocarcinomas, choriocarcinomas, yolk sac tumors, and teratomas), stromal tumors (e.g., Leydig cell tumors), hydrocele, hematocele, varicocele, spermatocele, inguinal hernia, and disorders of sperm production (e.g., immotile cilia syndrome, aspermia, asthenozoospermia, azoospermia, oligospermia, and teratozoospermia).

[0748] Reproductive system disorders also include, but are not limited to, disorders of the prostate gland, such as acute non-bacterial prostatitis, chronic non-bacterial prostatitis, acute bacterial prostatitis, chronic bacterial prostatitis, prostatodystonia, prostatosis, granulomatous prostatitis, malacoplakia, benign prostatic hypertrophy or hyperplasia, and prostate neoplastic disorders, including adenocarcinomas, transitional cell carcinomas, ductal carcinomas, and squamous cell carcinomas.

[0749] Additionally, the compositions of the invention may be useful in the diagnosis, treatment, and/or prevention of disorders or diseases of the penis and urethra, including, but not limited to, inflammatory disorders, such as balanoposthitis, balanitis xerotica obliterans, phimosis, paraphimosis, syphilis, herpes simplex virus, gonorrhea, non-gonococcal urethritis, chlamydia, mycoplasma, trichomonas, HIV, AIDS, Reiter's syndrome, condyloma acuminatum, condyloma latum, and pearly penile papules; urethral abnormalities, such as hypospadias, epispadias, and phimosis; premalignant lesions, including Erythroplasia of Queyrat, Bowen's disease, Bowenoid paplosis, giant condyloma of Buscke-Lowenstein, and varrucous carcinoma; penile cancers, including squamous cell carcinomas, carcinoma in situ, verrucous carcinoma, and disseminated penile carcinoma; urethral neoplastic disorders, including penile urethral carcinoma, bulbomembranous urethral carcinoma, and prostatic urethral carcinoma; and erectile disorders, such as priapism, Peyronie's disease, erectile dysfunction, and impotence.

[0750] Moreover, diseases and/or disorders of the vas deferens include, but are not limited to, vasculititis and CBAVD (congenital bilateral absence of the vas deferens); additionally, the polynucleotides, polypeptides, and agonists or antagonists of the present invention may be used in the diagnosis, treatment, and/or prevention of diseases and/or disorders of the seminal vesicles, including but not limited to, hydatid disease, congenital chloride diarrhea, and polycystic kidney disease.

[0751] Other disorders and/or diseases of the male reproductive system that may be diagnosed, treated, and/or prevented with the compositions of the invention include, but are not limited to, Klinefelter's syndrome, Young's syndrome, premature ejaculation, diabetes mellitus, cystic fibrosis, Kartagener's syndrome, high fever, multiple sclerosis, and gynecomastia.

[0752] Further, the polynucleotides, polypeptides, and agonists or antagonists of the present invention may be used in the diagnosis, treatment, and/or prevention of diseases and/or disorders of the vagina and vulva, including, but not limited to, bacterial vaginosis, candida vaginitis, herpes simplex virus, chancroid, granuloma inguinale, lymphogranuloma venereum, scabies, human papillomavirus, vaginal trauma, vulvar trauma, adenosis, chlamydia vaginitis, gonorrhea, trichomonas vaginitis, condyloma acuminatum, syphilis, molluscum contagiosum, atrophic vaginitis, Paget's disease, lichen sclerosus, lichen planus, vulvodynia, toxic shock syndrome, vaginismus, vulvovaginitis, vulvar vestibulitis, and neoplastic disorders, such as squamous cell hyperplasia, clear cell carcinoma, basal cell carcinoma, melanomas, cancer of Bartholin's gland, and vulvar intraepithelial neoplasia.

[0753] Disorders and/or diseases of the uterus that may be diagnosed, treated, and/or prevented with the compositions of the invention include, but are not limited to, dysmenorrhea, retroverted uterus, endometriosis, fibroids, adenomyosis, anovulatory bleeding, amenorrhea, Cushing's syndrome, hydatidiform moles, Asherman's syndrome, premature menopause, precocious puberty, uterine polyps, dysfunctional uterine bleeding (e.g., due to aberrant hormonal signals), and neoplastic disorders, such as adenocarcinomas, keiomyosarcomas, and sarcomas. Additionally, the polypeptides, polynucleotides, or agonists or antagonists of the invention may be useful as a marker or detector of, as well as in the diagnosis, treatment, and/or prevention of congenital uterine abnormalities, such as bicornuate uterus, septate uterus, simple unicornuate uterus, unicornuate uterus with a noncavitary rudimentary horn, unicornuate uterus with a non-communicating cavitary rudimentary horn, unicornuate uterus with a communicating cavitary horn, arcuate uterus, uterine didelfus, and T-shaped uterus.

[0754] Ovarian diseases and/or disorders that may be diagnosed, treated, and/or prevented with the compositions of the invention include, but are not limited to, anovulation, polycystic ovary syndrome (Stein-Leventhal syndrome), ovarian cysts, ovarian hypofunction, ovarian insensitivity to gonadotropins, ovarian overproduction of androgens, right ovarian vein syndrome, amenorrhea, hirutism, and ovarian cancer (including, but not limited to, primary and secondary cancerous growth, Sertoli-Leydig tumors, endometriod carcinoma of the ovary, ovarian papillary serous adenocarcinoma, ovarian mucinous adenocarcinoma, and Ovarian Krukenberg tumors).

[0755] Cervical diseases and/or disorders that may be diagnosed, treated, and/or prevented with the compositions of the invention include, but are not limited to, cervicitis, chronic cervicitis, mucopurulent cervicitis, cervical dysplasia, cervical polyps, Nabothian cysts, cervical erosion, cervical incompetence, and cervical neoplasms (including, for example, cervical carcinoma, squamous metaplasia, squamous cell carcinoma, adenosquamous cell neoplasia, and columnar cell neoplasia).

[0756] Additionally, diseases and/or disorders of the reproductive system that may be diagnosed, treated, and/or prevented with the compositions of the invention include, but are not limited to, disorders and/or diseases of pregnancy, including miscarriage and stillbirth, such as early abortion, late abortion, spontaneous abortion, induced abortion, therapeutic abortion, threatened abortion, missed abortion, incomplete abortion, complete abortion, habitual abortion, missed abortion, and septic abortion; ectopic pregnancy, anemia, Rh incompatibility, vaginal bleeding during pregnancy, gestational diabetes, intrauterine growth retardation, polyhydramnios, HELLP syndrome, abruptio placentae, placenta previa, hyperemesis, preeclampsia, eclampsia, herpes gestationis, and urticaria of pregnancy. Additionally, the polynucleotides, polypeptides, and agonists or antagonists of the present invention may be used in the diagnosis, treatment, and/or prevention of diseases that can complicate pregnancy, including heart disease, heart failure, rheumatic heart disease, congenital heart disease, mitral valve prolapse, high blood pressure, anemia, kidney disease, infectious disease (e.g., rubella, cytomegalovirus, toxoplasmosis, infectious hepatitis, chlamydia, HIV, AIDS, and genital herpes), diabetes mellitus, Graves' disease, thyroiditis, hypothyroidism, Hashimoto's thyroiditis, chronic active hepatitis, cirrhosis of the liver, primary biliary cirrhosis, asthma, systemic lupus eryematosis, rheumatoid arthritis, myasthenia gravis, idiopathic thrombocytopenic purpura, appendicitis, ovarian cysts, gallbladder disorders,and obstruction of the intestine.

[0757] Complications associated with labor and parturition that may be diagnosed, treated, and/or prevented with the compositions of the invention include, but are not limited to, premature rupture of the membranes, pre-term labor, post-term pregnancy, postmaturity, labor that progresses too slowly, fetal distress (e.g., abnormal heart rate (fetal or matemal), breathing problems, and abnormal fetal position), shoulder dystocia, prolapsed umbilical cord, amniotic fluid embolism, and aberrant uterine bleeding.

[0758] Further, diseases and/or disorders of the postdelivery period, that may be diagnosed, treated, and/or prevented with the compositions of the invention, include, but are not limited to, endometritis, myometritis, parametritis, peritonitis, pelvic thrombophlebitis, pulmonary embolism, endotoxemia, pyelonephritis, saphenous thrombophlebitis, mastitis, cystitis, postpartum hemorrhage, and inverted uterus.

[0759] Other disorders and/or diseases of the female reproductive system that may be diagnosed, treated, and/or prevented by the polynucleotides, polypeptides, and agonists or antagonists of the present invention include, but are not limited to, Turner's syndrome, pseudohermaphroditism, premenstrual syndrome, pelvic inflammatory disease, pelvic congestion (vascular engorgement), frigidity, anorgasmia, dyspareunia, ruptured fallopian tube, and Mittelschmerz.

[0760] Developmental and Inherited Disorders

[0761] Polynuceotides or polypeptides, or agonists or antagonists of the present invention may be used to treat, prevent, diagnose, and/or prognose diseases associated with mixed fetal tissues, including, but not limited to, developmental and inherited disorders or defects of the nervous system, musculoskelelal system, execretory system, cardiovascular system, hematopoietic system, gastrointestinal system, reproductive system, and respiratory system. Compositions of the present invention may also be used to treat, prevent, diagnose, and/or prognose developmental and inherited disorders or defects associated with, but not limited to, skin, hair, visual, and auditory tissues, metabolism. Additionally, the compositions of the invention may be useful in the diagnosis, treatment, and/or prevention of disorders or diseases associated with, but not limited to, chromosomal or genetic abnormalities and hyperproliferation or neoplasia.

[0762] Disorders or defects of the nervous system associated with developmental or inherited abnormalities that may be diagnosed, treated, and/or prevented with the compostions of the invention include, but are not limited to, adrenoleukodystrophy, agenesis of corpus callosum, Alexander disease, anencephaly, Angelman syndrome, Arnold-Chiari deformity, Batten disease, Canavan disease, cephalic disorders, Charcot-Marie-Tooth disease, encephalocele, Friedreich's ataxia, Gaucher's disease, Gorlin syndrome, Hallervorden-Spatz disease, hereditary spastic paraplegia, Huntington disease, hydranencephaly, hydrocephalus, Joubert syndrome, Lesch-Nyhan syndrome, leukodystrophy, Menkes disease, microcephaly, Niemann-Pick Type C1, neurofibromatosis, porencephaly, progeria, proteus syndrome, Refsum disease, spina bifida, Sturge-Weber syndrome, Tay-Sachs disease, tuberous sclerosis, and von Hippel-Lindau disease.

[0763] Developmental and inherited disorders resulting in disorders or defects of the musculoskeletal system that may be diagnosed, treated, and/or prevented with the compositions of the invention include, but are not limited to, achondroplasia, atlanto-occipital fusion, arthrogryposis mulitplex congenita, autosomal recessive muscular dystrophy, Becker's muscular dystrophy, cerebral palsy, choanal atresia, cleft lip, cleft palate, clubfoot, congenital amputation, congenital dislocation of the hip, congenital torticollis, congenital scoliosis, dopa-repsonsive dystonia, Duchenne muscular dystrophy, early-onset generalized dystonia, femoral torsion, Gorlin syndrome, hypophosphatasia, Klippel-Feil syndrome, knee dislocation, myoclonic dystonia, myotonic dystrophy, nail-patella syndrome, osteogenesis imperfecta, paroxysmal dystonia, progeria, prune-belly syndrome, rapid-onset dystonia parkinsonism, scolosis, syndactyly, Treacher Collins' syndrome, velocardiofacial syndrome, and X-linked dystonia-parkinsonism.

[0764] Developmental or hereditary disorders or defects of the excretory system that may be diagnosed, treated, and/or prevented with the compositions of the invention include, but are not limited to, Alport's syndrome, Bartter's syndrome, bladder diverticula, bladder exstrophy, cystinuria, epispadias, Fanconi's syndrome, Hartnup disease, horseshoe kidney, hypospadias, kidney agenesis, kidney ectopia, kidney malrotation, Liddle's syndrome, medullary cystic disease, medullary sponge, multicystic kidney, kidney polycystic kidney disease, nail-patella syndrome, Potter's syndrome, urinary tract flow obstruction, vitamin D-resistant rickets, and Wilm's tumor.

[0765] Cardiovascular disorders or defects of developmental or hereditary origin that may be diagnosed, treated, and/or prevented with the compositions of the inventtion include, but are not limited to, aortic valve stenosis, atrial septal defects, artioventricular (A-V) canal defect, bicuspid aortic valve, coarctation or the aorta, dextrocardia, Ebstein's anomaly, Eisenmenger's complex, hypoplastic left heart syndrome, Marfan syndrome, patent ductus arteriosus, progeria, pulmonary atresia, pulmonary valve stenosis, subaortic stenosis, tetralogy of fallot, total anomalous pulmonary venous (P-V) connection, transposition of the great arteries, tricuspid atresia, truncus arteriosus, ventricular septal defects. Developmental or inherited disorders resulting in disorders involving the hematopoietic system that may be diagnosed, treated, and/or prevented with the compositions of the invention include, but not limited to, Bernard-Soulier syndrome, Chédiak-Higashi syndrome, hemophilia, Hermansky-Pudlak syndrome, sickle cell anemia, storage pool disease, thromboxane A2 dysfunction, thrombasthenia, and von Willebrand's disease.

[0766] The compositions of the invention may also be used to diagnose, treat, and/or prevent developmental and inherited disorders resulting in disorders or defects of the gastrointestinal system, including, but not limited to, anal atresia, biliary atresia, esophageal atresia, diaphragmatic hernia, Hirschsprung's disease, Meckel's diverticulum, oligohydramnios, omphalocele, polyhydramnios, porphyria, situs inversus viscera. Developmental or inherited disorders resulting in metabolic disorders that may be diagnosed, treated, and/or prevented with the compositions of the invention include, but are not limited to, alpha-1 antitrypsin deficiency, cystic fibrosis, hemochromatosis, lysosomal storage disease, phenylketonuria, Wilson's disease, and Zellweger syndrome.

[0767] Disorders of the reproductive system that are developmentally or hereditary related that may also be diagnosed, treated, and/or prevented with the compositions of the invention include, but are not limited to, androgen insensitivity syndrome, ambiguous genitalia, autosomal sex reversal, congenital adreneal hyperplasia, gonadoblastoma, ovarian germ cell cancer, pseudohermphroditism, true hermaphroditism, undescended testis, XX male syndrome, and XY female type gonadal dysgenesis. The compositions of the invention may also be used to diagnose, treat, and/or prevent developmental or inherited respiratory defects including, but not limited to, askin tumor, azygos lobe, congenital diaphragmatic hernia, congenital lobar emphysema, cystic adenomatoid malformation, lobar emphysema, hyaline membrane disease, and pectus excavatum.

[0768] Developmental or inherited disorders may also result from chromosomal or genetic aberration that may be diagnosed, treated, and/or prevented with the compositions of the invention including, but not limited to, 4p- syndrome, cri du chat syndrome, Digeorge syndrome, Down's syndrome, Edward's syndrome, fragile X syndrome, Klinefelter's syndrome, Patau's syndrome, Prader-Willi syndrome, progeria, Turner's syndrome, triple X syndrome, and XYY syndrome. Other developmental disorders that can be diagnosed, treated, and/or prevented with the compositions of the invention, include, but are not limited to, fetal alcohol syndrome, and can be caused by environmental factors surrounding the developing fetus.

[0769] The compositions of the invention may further be able to be used to diagnose, treat, and/or prevent errors in development or a genetic disposition that may result in hyperproliferative disorders or neoplasms, including, but not limited to, acute childhood lymphoblastic leukemia, askin tumor, Beckwith-Wiedemann syndrome, childhood acute myeloid leukemia, childhood brain stem glioma, childhood cerebellar astrocytoma, childhood extracranial germ cell tumors childhood (primary), gonadoblastoma, hepatocellular cancer, childhood Hodgkin's disease, childhood Hodgkin's lymphoma, childhood hypothalamic and visual pathway glioma, childhood (primary) liver cancer, childhood lymphoblastic leukemia, childhood medulloblastoma, childhood non-Hodgkin's lymphoma, childhood pineal and supratentorial primitive neuroectodermal tumors, childhood primary liver cancer, childhood rhabdomyosarcoma, childhood soft tissue sarcoma, Gorlin syndrome, familial multiple endrocrine neoplasia type I, neuroblastoma, ovarian germ cell cancer, pheochromocytoma, retinoblastoma, and Wilm's tumor.

[0770] Polypeptides may be administered using any method known in the art, including, but not limited to, direct needle injection at the delivery site, intravenous injection, topical administration, catheter infusion, biolistic injectors, particle accelerators, gelfoam sponge depots, other commercially available depot materials, osmotic pumps, oral or suppositorial solid pharmaceutical formulations, decanting or topical applications during surgery, aerosol delivery. Such methods are known in the art. Polypeptides may be administered as part of a Therapeutic, described in more detail below. Methods of delivering polynucleotides are described in more detail herein.

[0771] Diseases at the Cellular Level

[0772] Diseases associated with increased cell survival or the inhibition of apoptosis that could be treated, prevented, diagnosed and/or prognosed using polynucleotides or polypeptides, as well as antagonists or agonists of the present invention, include cancers (such as follicular lymphomas, carcinomas with p53 mutations, and hormone-dependent tumors, including, but not limited to colon cancer, cardiac tumors, pancreatic cancer, melanoma, retinoblastoma, glioblastoma, lung cancer, intestinal cancer, testicular cancer, stomach cancer, neuroblastoma, myxoma, myoma, lymphoma, endothelioma, osteoblastoma, osteoclastoma, osteosarcoma, chondrosarcoma, adenoma, breast cancer, prostate cancer, Kaposi's sarcoma and ovarian cancer); autoimmune disorders (such as, multiple sclerosis, Sjogren's syndrome, Hashimoto's thyroiditis, biliary cirrhosis, Behcet's disease, Crohn's disease, polymyositis, systemic lupus erythematosus and immune-related glomerulonephritis and rheumatoid arthritis) and viral infections (such as herpes viruses, pox viruses and adenoviruses), inflammation, graft v. host disease, acute graft rejection, and chronic graft rejection.

[0773] In preferred embodiments, polynucleotides, polypeptides, and/or antagonists of the invention are used to inhibit growth, progression, and/or metastasis of cancers, in particular those [listed above] involving excretory system tissues.

[0774] Additional diseases or conditions associated with increased cell survival that could be treated or detected by polynucleotides or polypeptides, or agonists or antagonists of the present invention include, but are not limited to, progression, and/or metastases of malignancies and related disorders such as leukemia (including acute leukemias (e.g., acute lymphocytic leukemia, acute myelocytic leukemia (including myeloblastic, promyelocytic, myelomonocytic, monocytic, and erythroleukemia)) and chronic leukemias (e.g., chronic myelocytic (granulocytic) leukemia and chronic lymphocytic leukemia)), polycythemia vera, lymphomas (e.g., Hodgkin's disease and non-Hodgkin's disease), multiple myeloma, Waldenstrom's macroglobulinemia, heavy chain disease, and solid tumors including, but not limited to, sarcomas and carcinomas such as fibrosarcoma, myxosarcoma, liposarcoma, chondrosarcoma, osteogenic sarcoma, chordoma, angiosarcoma, endotheliosarcoma, lymphangiosarcoma, lymphangioendotheliosarcoma, synovioma, mesothelioma, Ewing's tumor, leiomyosarcoma, rhabdomyosarcoma, colon carcinoma, pancreatic cancer, breast cancer, ovarian cancer, prostate cancer, squamous cell carcinoma, basal cell carcinoma, adenocarcinoma, sweat gland carcinoma, sebaceous gland carcinoma, papillary carcinoma, papillary adenocarcinomas, cystadenocarcinoma, medullary carcinoma, bronchogenic carcinoma, renal cell carcinoma, hepatoma, bile duct carcinoma, choriocarcinoma, seminoma, embryonal carcinoma, Wilm's tumor, cervical cancer, testicular tumor, lung carcinoma, small cell lung carcinoma, bladder carcinoma, epithelial carcinoma, glioma, astrocytoma, medulloblastoma, craniopharyngioma, ependymoma, pinealoma, hemangioblastoma, acoustic neuroma, oligodendroglioma, menangioma, melanoma, neuroblastoma, and retinoblastoma.

[0775] Diseases associated with increased apoptosis that could be treated, prevented, diagnosted, and/or prognosed using polynucleotides or potypeptides, as well as agonists or antagonists of the present invention, include, but are not limited to, AIDS; neurodegenerative disorders (such as Alzheimer's disease, Parkinson's disease, Amyotrophic lateral sclerosis, Retinitis pigmentosa, Cerebellar degeneration and brain tumor or prior associated disease); autoimmune disorders (such as, multiple sclerosis, Sjogren's syndrome, Hashimoto's thyroiditis, biliary cirrhosis, Behcet's disease, Crohn's disease, polymyositis, systemic lupus erythematosus and immune-related glomerulonephritis and rheumatoid arthritis) myelodysplastic syndromes (such as aplastic anemia), graft v. host disease, ischemic injury (such as that caused by myocardial infarction, stroke and reperfusion injury), liver injury (e.g., hepatitis related liver injury, ischemia/reperfusion injury, cholestosis (bile duct injury) and liver cancer); toxin-induced liver disease (such as that caused by alcohol), septic shock, cachexia and anorexia.

[0776] Wound Healing and Epithelial Cell Proliferation

[0777] In accordance with yet a further aspect of the present invention, there is provided a process for utilizing polynucleotides or polypeptides, as well as agonists or antagonists of the present invention, for therapeutic purposes, for example, to stimulate epithelial cell proliferation and basal keratinocytes for the purpose of wound healing, and to stimulate hair follicle production and healing of dermal wounds. Polynucleotides or polypeptides, as well as agonists or antagonists of the present invention, may be clinically useful in stimulating wound healing including surgical wounds, excisional wounds, deep wounds involving damage of the dermis and epidermis, eye tissue wounds, dental tissue wounds, oral cavity wounds, diabetic ulcers, dermal ulcers, cubitus ulcers, arterial ulcers, venous stasis ulcers, burns resulting from heat exposure or chemicals, and other abnormal wound healing conditions such as uremia, malnutrition, vitamin deficiencies and complications associated with systemic treatment with steroids, radiation therapy and antineoplastic drugs and antimetabolites. Polynucleotides or polypeptides, as well as agonists or antagonists of the present invention, could be used to promote dermal reestablishment subsequent to dermal loss.

[0778] Polynucleotides or polypeptides, as well as agonists or antagonists of the present invention, could be used to increase the adherence of skin grafts to a wound bed and to stimulate re-epithelialization from the wound bed. The following are types of grafts that polynucleotides or polypeptides, agonists or antagonists of the present invention, could be used to increase adherence to a wound bed: autografts, artificial skin, allografts, autodermic graft, autoepdermic grafts, avacular grafts, Blair-Brown grafts, bone graft, brephoplastic grafts, cutis graft, delayed graft, dermic graft, epider-mic graft, fascia graft, full thickness graft, heterologous graft, xenograft, homologous graft, hyperplastic graft, lamellar graft, mesh graft, mucosal graft, Ollier-Thiersch graft, omenpal graft, patch graft, pedicle graft, penetrating graft, split skin graft, thick split graft. Polynucleotides or polypeptides, as well as agonists or antagonists of the present invention, can be used to promote skin strength and to improve the appearance of aged skin.

[0779] It is believed that polynucleotides or polypeptides, as well as agonists or antagonists of the present invention, will also produce changes in hepatocyte proliferation, and epithelial cell proliferation in the lung, breast, pancreas, stomach, small intestine, and large intestine. Polynucleotides or polypeptides, as well as agonists or antagonists of the present invention, could promote proliferation of epithelial cells such as sebocytes, hair follicles, hepatocytes, type II pneumocytes, mucin-producing goblet cells, and other epithelial cells and their progenitors contained within the skin, lung, liver, and gastrointestinal tract. Polynucleotides or polypeptides, agonists or antagonists of the present invention, may promote proliferation of endothelial cells, keratinocytes, and basal keratinocytes.

[0780] Polynucleotides or polypeptides, as well as agonists or antagonists of the present invention, could also be used to reduce the side effects of gut toxicity that result from radiation, chemotherapy treatments or viral infections. Polynucleotides or polypeptides, as well as agonists or antagonists of the present invention, may have a cytoprotective effect on the small intestine mucosa. Polynucleotides or polypeptides, as well as agonists or antagonists of the present invention, may also stimulate healing of mucositis (mouth ulcers) that result from chemotherapy and viral infections.

[0781] Polynucleotides'or polypeptides, as well as agonists or antagonists of the present invention, could further be used in full regeneration of skin in full and partial thickness skin defects, including burns, (i.e., repopulation of hair follicles, sweat glands, and sebaceous glands), treatment of other skin defects such as psoriasis. Polynucleotides or polypeptides, as well as agonists or antagonists of the present invention, could be used to treat epidermolysis bullosa, a defect in adherence of the epidermis to the underlying dermis which results in frequent, open and painful blisters by accelerating reepithelialization of these lesions. Polynucleotides or polypeptides, as well as agonists or antagonists of the present invention, could also be used to treat gastric and doudenal ulcers'and help heal by scar formation of the mucosal lining and regeneration of glandular mucosa and duodenal mucosal lining more rapidly. Inflammatory bowel diseases, such as Crohn's disease and ulcerative colitis, are diseases, which result in destruction of the mucosal surface of the small or large intestine, respectively. Thus, polynucleotides or polypeptides, as well as agonists or antagonists of the present invention, could be used to promote the resurfacing of the mucosal surface to aid more rapid healing and to prevent progression of inflammatory bowel disease. Treatment with polynucleotides or polypeptides, agonists or antagonists of the present invention, is expected to have a significant effect on the production of mucus throughout the gastrointestinal tract and could be used to protect the intestinal mucosa from injurious substances that are ingested or following surgery. Polynucleotides or polypeptides, as well as agonists or antagonists of the present invention, could be used to treat diseases associate with the under expression.

[0782] Moreover, polynucleotides or polypeptides, as well as agonists or antagonists of the present invention, could be used to prevent and heal damage to the lungs due to various pathological states. Polynucleotides or polypeptides, as well as agonists or antagonists of the present invention, could stimulate proliferation and differentiation and promote the repair of alveoli and brochiolar epithelium to prevent or treat acute or chronic lung damage. For example, emphysema, which results in the progressive loss of aveoli, and inhalation injuries, i.e., resulting from smoke inhalation and bums, that cause necrosis of the bronchiolar epithelium and alveoli could be effectively treated using polynucleotides or polypeptides, agonists or antagonists of the present invention. Also, polynucleotides or polypeptides, as well as agonists or antagonists of the present invention, could be used to stimulate the proliferation of and differentiation of type II pneumocytes, which may help treat or prevent disease such as hyaline membrane diseases, such as infant respiratory distress syndrome and bronchopulmonary displasia, in premature infants.

[0783] Polynucleotides or polypeptides, as well as agonists or antagonists of the present invention, could stimulate the proliferation and differentiation of hepatocytes and, thus, could be used to alleviate or treat liver diseases and pathologies such as fulminant liver failure caused by cirrhosis, liver damage caused by viral hepatitis and toxic substances (i.e., acetaminophen, carbon tetraholoride and other hepatotoxins known in the art).

[0784] In addition, polynucleotides or polypeptides, as well as agonists or antagonists of the present invention, could be used treat or prevent the onset of diabetes mellitus. In patients with newly diagnosed Types I and II diabetes, where some islet cell function remains, polynucleotides or polypeptides, as well as agonists or antagonists of the present invention, could be used to maintain the islet function so as to alleviate, delay or prevent permanent manifestation of the disease. Also, polynucleotides or polypeptides, as well as agonists or antagonists of the present invention, could be used as an auxiliary in islet cell transplantation to improve or promote islet cell function.

[0785] Infectious Disease

[0786] Polynucleotides or polypeptides, as well as agonists or antagonists of the present invention can be used to treat or detect infectious agents. For example, by increasing the immune response, particularly increasing the proliferation and differentiation of B and/or T cells, infectious diseases may be treated. The immune response may be increased by either enhancing an existing immune response, or by initiating a new immune response. Alternatively, polynucleotides or polypeptides, as well as agonists or antagonists of the present invention may also directly inhibit the infectious agent, without necessarily eliciting an immune response.

[0787] Viruses are one example of an infectious agent that can cause disease or symptoms that can be treated or detected by a polynucleotide or polypeptide and/or agonist or antagonist of the present invention. Examples of viruses, include, but are not limited to Examples of viruses, include, but are not limited to the following DNA and RNA viruses and viral families: Arbovirus, Adenoviridae, Arenaviridae, Arterivirus, Birnaviridae, Bunyaviridae, Caliciviridae, Circoviridae, Coronaviridae, Dengue, EBV, HIV, Flaviviridae, Hepadnaviridae (Hepatitis), Herpesviridae (such as, Cytomegalovirus, Herpes Simplex, Herpes Zoster), Mononegavirus (e.g., Paramyxoviridae, Morbillivirus, Rhabdoviridae), Orthomyxoviridae (e.g., Influenza A, Influenza B, and parainfluenza), Papiloma virus, Papovaviridae, Parvoviridae, Picornaviridae, Poxviridae (such as Smallpox or Vaccinia), Reoviridae (e.g., Rotavirus), Retroviridae (HTLV-I, HTLV-II, Lentivirus), and Togaviridae (e.g., Rubivirus). Viruses falling within these families can cause a variety of diseases or symptoms, including, but not limited to: arthritis, bronchiollitis, respiratory syncytial virus, encephalitis, eye infections (e.g., conjunctivitis, keratitis), chronic fatigue syndrome, hepatitis (A, B, C, E, Chronic Active, Delta), Japanese B encephalitis, Junin, Chikungunya, Rift Valley fever, yellow fever, meningitis, opportunistic infections (e.g., AIDS), pneumonia, Burkitt's Lymphoma, chickenpox, hemorrhagic fever, Measles, Mumps, Parainfluenza, Rabies, the common cold, Polio, leukemia, Rubella, sexually transmitted diseases, skin diseases (e.g., Kaposi's, warts), and viremia. polynucleotides or polypeptides, or agonists or antagonists of the invention, can be used to treat or detect any of these symptoms or diseases. In specific embodiments, polynucleotides, polypeptides, or agonists or antagonists of the invention are used to treat: meningitis, Dengue, EBV, and/or hepatitis (e.g., hepatitis B). In an additional specific embodiment polynucleotides, polypeptides, or agonists or antagonists of the invention are used to treat patients nonresponsive to one or more other commercially available hepatitis vaccines. In a further specific embodiment polynucleotides, polypeptides, or agonists or antagonists of the invention are used to treat AIDS.

[0788] Similarly, bacterial or fungal agents that can cause disease or symptoms and that can be treated or detected by a polynucleotide or polypeptide and/or agonist or antagonist of the present invention include, but not limited to, include, but not limited to, the following Gram-Negative and Gram-positive bacteria and bacterial families and fungi: Actinomycetales (e.g., Corynebacterium, Mycobacterium, Norcardia), Cryptococcus neoformans, Aspergillosis, Bacillaceae (e.g., Anthrax, Clostridium), Bacteroidaceae, Blastomycosis, Bordetella, Borrelia (e.g., Borrelia burgdorferi, Brucellosis, Candidiasis, Campylobacter, Coccidioidomycosis, Cryptococcosis, Dermatocycoses, E. coli (e.g., Enterotoxigenic E. coli and Enterohemorrhagic E. coli), Enterobacteriaceae (Klebsiella, Salmonella (e.g., Salmonella typhi, and Salmonella paratyphi), Serratia, Yersinia), Erysipelothrix, Helicobacter, Legionellosis, Leptospirosis, Listeria, Mycoplasmatales, Mycobacterium leprae, Vibrio cholerae, Neisseriaceae (e.g., Acinetobacter, Gonorrhea, Menigococcal), Meisseria meningitidis, Pasteurellacea Infections (e.g., Actinobacillus, Heamophilus (e.g., Heamophilus influenza type B), Pasteurella), Pseudomonas, Rickettsiaceae, Chlamydiaceae, Treponema spp., Leptospira spp., Shigella spp., Staphylococcal, Meningiococcal, Pneumococcal and Streptococcal (e.g., Streptococcus pneumoniae and Group B Streptococcus). These bacterial or fungal families can cause the following diseases or symptoms, including, but not limited to: bacteremia, endocarditis, eye infections (conjunctivitis, tuberculosis, uveitis), gingivitis, opportunistic infections (e.g., AIDS related infections), paronychia, prosthesis-related infections, Reiter's Disease, respiratory tract infections, such as Whooping Cough or Empyema, sepsis, Lyme Disease, Cat-Scratch Disease, Dysentery, Paratyphoid Fever, food poisoning, Typhoid, pneumonia, Gonorrhea, meningitis (e.g., mengitis types A and B), Chlamydia, Syphilis, Diphtheria, Leprosy, Paratuberculosis, Tuberculosis, Lupus, Botulism, gangrene, tetanus, impetigo, Rheumatic Fever, Scarlet Fever, sexually transmitted diseases, skin diseases (e.g., cellulitis, dermatocycoses), toxemia, urinary tract infections, wound infections. Polynucleotides or polypeptides, agonists or antagonists of the invention, can be used to treat or detect any of these symptoms or diseases. In specific embodiments, Ppolynucleotides, polypeptides, agonists or antagonists of the invention are used to treat: tetanus, Diptheria, botulism, and/or meningitis type B.

[0789] Moreover, parasitic agents causing disease or symptoms that can be treated or detected by a polynucleotide or polypeptide and/or agonist or antagonist of the present invention include, but not limited to, the following families or class: Amebiasis, Babesiosis, Coccidiosis, Cryptosporidiosis, Dientamoebiasis, Dourine, Ectoparasitic, Giardiasis, Helminthiasis, Leishmaniasis, Theileriasis, Toxoplasmosis, Trypanosomiasis, and Trichomonas and Sporozoans (e.g., Plasmodium virax, Plasmodium falciparium, Plasmodium malariae and Plasmodium ovate). These parasites can cause a variety of diseases or symptoms, including, but not limited to: Scabies, Trombiculiasis, eye infections, intestinal disease (e.g., dysentery, giardiasis), liver disease, lung disease, opportunistic infections (e.g., AIDS related), malaria, pregnancy complications, and toxoplasmosis. polynucleotides or polypeptides, or agonists or antagonists of the invention, can be used to treat or detect any ,of these symptoms or diseases.

[0790] Polynucleotides or polypeptides, as well as agonists or antagonists of the present invention of the present invention could either be by administering an effective amount of a polypeptide to the patient, or by removing cells from the patient, supplying the cells with a polynucleotide of the present invention, and returning the engineered cells to the patient (ex vivo therapy). Moreover, the polypeptide or polynucleotide of the present invention can be used as an antigen in a vaccine to raise an immune response against infectious disease.

[0791] Regeneration

[0792] Polynucleotides or polypeptides, as well as agonists or antagonists of the present invention can be used to differentiate, proliferate, and attract cells, leading to the regeneration of tissues. (See, Science 276:59-87 (1997).) The regeneration of tissues could be used to repair, replace, or protect tissue damaged by congenital defects, trauma (wounds, burns, incisions, or ulcers), age, disease (e.g. osteoporosis, osteocarthritis, periodontal disease, liver failure), surgery, including cosmetic plastic surgery, fibrosis, reperfusion injury, or systemic cytokine damage.

[0793] Tissues that could be regenerated using the present invention include organs (e.g., pancreas, liver, intestine, kidney, skin, endothelium), muscle (smooth, skeletal or cardiac), vasculature (including vascular and lymphatics), nervous, hematopoietic, and skeletal (bone, cartilage, tendon, and ligament) tissue. Preferably, regeneration occurs without or decreased scarring. Regeneration also may include angiogenesis.

[0794] Moreover, polynucleotides or polypeptides, as well as agonists or antagonists of the present invention, may increase regeneration of tissues difficult to heal. For example, increased tendon/ligament regeneration would quicken recovery time after damage. Polynucleotides or polypeptides, as well as agonists or antagonists of the present invention could also be used prophylactically in an effort to avoid damage. Specific diseases that could be treated include of tendinitis, carpal tunnel syndrome, and other tendon or ligament defects. A further example of tissue regeneration of non-healing wounds includes pressure ulcers, ulcers associated with vascular insufficiency, surgical, and traumatic wounds.

[0795] Similarly, nerve and brain tissue could also be regenerated by using polynucleotides or polypeptides, as well as agonists or antagonists of the present invention, to proliferate and differentiate nerve cells. Diseases that could be treated using this method include central and peripheral nervous system diseases, neuropathies, or mechanical and traumatic disorders (e.g., spinal cord disorders, head trauma, cerebrovascular disease, and stoke). Specifically, diseases associated with peripheral nerve injuries, peripheral neuropathy (e.g., resulting from chemotherapy or other medical therapies), localized neuropathies, and central nervous system diseases (e.g., Alzheimer's disease, Parkinson's disease, Huntington's disease, amyotrophic lateral sclerosis, and Shy-Drager syndrome), could all be treated using the polynucleotides or polypeptides, as well as agonists or antagonists of the present invention.

[0796] Chemotaxis

[0797] Polynucleotides or polypeptides, as well as agonists or antagonists of the present invention may have chemotaxis activity. A chemotaxic molecule attracts or mobilizes cells (e.g., monocytes, fibroblasts, neutrophils, T-cells, mast cells, eosinophils, epithelial and/or endothelial cells) to a particular site in the body, such as inflammation, infection, or site of hyperproliferation. The mobilized cells can then fight off and/or heal the particular trauma or abnormality.

[0798] Polynucleotides or polypeptides, as well as agonists or antagonists of the present invention may increase chemotaxic activity of particular cells. These chemotactic molecules can then be used to treat inflammation, infection, hyperproliferative disorders, or any immune system disorder by increasing the number of cells targeted to a particular location in the body. For example, chemotaxic molecules can be used to treat wounds and other trauma to tissues by attracting immune cells to the injured location. Chemotactic molecules of the present invention can also attract fibroblasts, which can be used to treat wounds.

[0799] It is also contemplated that polynucleotides or polypeptides, as well as agonists or antagonists of the present invention may inhibit chemotactic activity. These molecules could also be used to treat disorders. Thus, polynucleotides or polypeptides, as well as agonists or antagonists of the present invention could be used as an inhibitor of chemotaxis.

[0800] Binding Activity

[0801] A polypeptide of the present invention may be used to screen for molecules that bind to the polypeptide or for molecules to which the polypeptide binds. The binding of the polypeptide and the molecule may activate (agonist), increase, inhibit (antagonist), or decrease activity of the polypeptide or the molecule bound. Examples of such molecules include antibodies, oligonucleotides, proteins (e.g., receptors),or small molecules.

[0802] Preferably, the molecule is closely related to the natural ligand of the polypeptide, e.g., a fragment of the ligand, or a natural substrate, a ligand, a structural or functional mimetic. (See, Coligan et al., Current Protocols in Immunology 1(2):Chapter 5 (1991).) Similarly, the molecule can be closely related to the natural receptor to which the polypeptide binds, or at least, a fragment of the receptor capable of being bound by the polypeptide (e.g., active site). In either case, the molecule can be rationally designed using known techniques.

[0803] Preferably, the screening for these molecules involves producing appropriate cells, which express the polypeptide. Preferred cells include cells from mammals, yeast, Drosophila, or E. coli. Cells expressing the polypeptide (or cell membrane containing the expressed polypeptide) are then preferably contacted with a test compound potentially containing the molecule to observe binding, stimulation, or inhibition of activity of either the polypeptide or the molecule.

[0804] The assay may simply test binding of a candidate compound to the polypeptide, wherein binding is detected by a label, or in an assay involving competition with a labeled competitor. Further, the assay may test whether the candidate compound results in a signal generated by binding to the polypeptide.

[0805] Alternatively, the assay can be carried out using cell-free preparations, polypeptide/molecule affixed to a solid support, chemical libraries, or natural product mixtures. The assay may also simply comprise the steps of mixing a candidate compound with a solution containing a polypeptide, measuring polypeptide/molecule activity or binding, and comparing the polypeptide/molecule activity or binding to a standard.

[0806] Preferably, an ELISA assay can measure polypeptide level or activity in a sample (e.g., biological sample) using a monoclonal or polyclonal antibody. The antibody can measure polypeptide level or activity by either binding, directly or indirectly, to the polypeptide or by competing with the polypeptide for a substrate.

[0807] Additionally, the receptor to which the polypeptide of the present invention binds can be identified by numerous methods known to those of skill in the art, for example, ligand panning and FACS sorting (Coligan, et al., Current Protocols in Immun., 1(2), Chapter 5, (1991)). For example, expression cloning is employed wherein polyadenylated RNA is prepared from a cell responsive to the polypeptides, for example, NIH3T3 cells which are known to contain multiple receptors for the FGF family proteins, and SC-3 cells, and a cDNA library created from this RNA is divided into pools and used to transfect COS cells or other cells that are not responsive to the polypeptides. Transfected cells which are grown on glass slides are exposed to the polypeptide of the present invention, after they have been labeled. The polypeptides can be labeled by a variety of means including iodination or inclusion of a recognition site for a site-specific protein kinase.

[0808] Following fixation and incubation, the slides are subjected to auto-radiographic analysis. Positive pools are identified and sub-pools are prepared and re-transfected using an iterative sub-pooling and re-screening process, eventually yielding single clones that encode the putative receptor.

[0809] As an alternative approach for receptor identification, the labeled polypeptides can be photoaffinity linked with cell membrane or extract preparations that express the receptor molecule. Cross-linked material is resolved by PAGE analysis and exposed to X-ray film. The labeled complex containing the receptors of the polypeptides can be excised, resolved into peptide fragments, and subjected to protein microsequencing. The amino acid sequence obtained from microsequencing would be used to design a set of degenerate oligonucieotide probes to screen a cDNA library to identify the genes encoding the putative receptors.

[0810] Moreover, the techniques of gene-shuffling, motif-shuffling, exon-shuffling, and/or codon-shuffling (collectively referred to as “DNA shuffling”) may be employed to modulate the activities of the polypeptide of the present invention thereby effectively generating agonists and antagonists of the polypeptide of the present invention. See generally, U.S. Pat. Nos. 5,605,793, 5,811,238, 5,830,721, 5,834,252, and 5,837,458, and Patten, P. A., et al., Curr. Opinion Biotechnol. 8:724-33 (1997); Harayama, S. Trends Biotechnol. 16(2):76-82 (1998); Hansson L. O., et al., J. Mol. Biol. 287:265-76 (1999); and Lorenzo, M. M. and Blasco, R. Biotechniques 24(2):308-13 (1998); each of these patents and publications are hereby incorporated by reference). In one embodiment, alteration of polynucleotides and corresponding polypeptides may be achieved by DNA shuffling. DNA shuffling involves the assembly of two or more DNA segments into a desired molecule by homologous, or site-specific, recombination. In another embodiment, polynucleotides and corresponding polypeptides may be altered by being subjected to random mutagenesis by error-prone PCR, random nucleotide insertion or other methods prior to recombination. In another embodiment, one or more components, motifs, sections, parts, domains, fragments, etc., of the polypeptide of the present invention may be recombined with one or more components, motifs, sections, parts, domains, fragments, etc. of one or more heterotogous molecules. In preferred embodiments, the heterologous molecules are family members. In further preferred embodiments, the heterologous molecule is a growth factor such as, for example, platelet-derived growth factor (PDGF), insulin-like growth factor (IGF-I), transforming growth factor (TGF)-alpha, epidermal growth factor (EGF), fibroblast growth factor (FGF), TGF-beta, bone morphogenetic protein (BMP)-2, BMP-4, BMP-5, BMP-6, BMP-7, activins A and B, decapentaplegic(dpp), 60A, OP-2, dorsalin, growth differentiation factors (GDFs), nodal, MIS, inhibin-alpha, TGF-betal, TGF-beta2, TGF-beta3, TGF-beta5, and glial-derived neurotrophic factor (GDNF).

[0811] Other preferred fragments are biologically active fragments of the polypeptide of the present invention. Biologically active fragments are those exhibiting activity similar, but not necessarily identical, to an activity of the polypeptide of the present invention. The biological activity of the fragments may include an improved desired activity, or a decreased undesirable activity.

[0812] Additionally, this invention provides a method of screening compounds to identify those which modulate the action of the polypeptide of the present invention. An example of such an assay comprises combining a mammalian fibroblast cell, a the polypeptide of the present invention, the compound to be screened and ³[H] thymidine under cell culture conditions where the fibroblast cell would normally proliferate. A control assay may be performed in the absence of the compound to be screened and compared to the amount of fibroblast proliferation in the presence of the compound to determine if the compound stimulates proliferation by determining the uptake of ³[H] thymidine in each case. The amount of fibroblast cell proliferation is measured by liquid scintillation chromatography which measures the incorporation of ³[H] thymidine. Both agonist and antagonist compounds may be identified by this procedure.

[0813] In another method, a mammalian cell or membrane preparation expressing a receptor for a polypeptide of the present invention is incubated with a labeled polypeptide of the present invention in the presence of the compound. The ability of the compound to enhance or block this interaction could then be measured. Alternatively, the response of a known second messenger system following interaction of a compound to be screened and the receptor is measured and the ability of the compound to bind to the receptor and elicit a second messenger response is measured to determine if the compound is a potential agonist or antagonist. Such second messenger systems include but are not limited to, cAMP guanylate cyclase, ion channels or phosphoinositide hydrolysis.

[0814] All of these above assays can be used as diagnostic or prognostic markers. The molecules discovered using these assays can be used to treat disease or to bring about a particular result in a patient (e.g., blood vessel growth) by activating or inhibiting the polypeptide/molecule. Moreover, the assays can discover agents, which may inhibit or enhance the production of the polypeptides of the invention from suitably manipulated cells or tissues.

[0815] Therefore, the invention includes a method of identifying compounds which bind to a polypeptide of the invention comprising the steps of: (a) incubating a candidate binding compound with a polypeptide of the present invention; and (b) determining if binding has occurred. Moreover, the invention includes a method of identifying agonists/antagonists comprising the steps of: (a) incubating a candidate compound with a polypeptide of the present invention, (b) assaying a biological activity, and (b) determining if a biological activity of the polypeptide has been altered.

[0816] Targeted Delivery

[0817] In another embodiment, the invention provides a method of delivering compositions to targeted cells expressing a receptor for a polypeptide of the invention, or cells expressing a cell bound form of a polypeptide of the invention.

[0818] As discussed herein, polypeptides or antibodies of the invention may be associated with heterologous polypeptides, heterologous nucleic acids, toxins, or prodrugs via hydrophobic, hydrophilic, ionic and/or covalent interactions. In one embodiment, the invention provides a method for the specific delivery of compositions of the invention to cells by administering polypeptides of the invention (including antibodies) that are associated with heterologous polypeptides or nucleic acids. In one example, the invention provides a method for delivering a therapeutic protein into the targeted cell. In another example, the invention provides a method for delivering a single stranded nucleic acid (e.g., antisense or ribozymes) or double stranded nucleic acid (e.g., DNA that can integrate into the cell's genome or replicate episomally and that can be transcribed) into the targeted cell.

[0819] In another embodiment, the invention provides a method for the specific destruction of cells (e.g., the destruction of tumor cells) by administering polypeptides of the invention (e.g., polypeptides of the invention or antibodies of the invention) in association with toxins or cytotoxic prodrugs.

[0820] By “toxin” is meant compounds that bind and activate endogenous cytotoxic effector systems, radioisotopes, holotoxins, modified toxins, catalytic subunits of toxins, or any molecules or enzymes not normnally present in or on the surface of a cell that under defined conditions cause the cell's death. Toxins that may be used according to the methods of the invention include, but are not limited to, radioisotopes known in the art, compounds such as, for example, antibodies (or complement fixing containing portions thereof) that bind an inherent or induced endogenous cytotoxic effector system, thymidine kinase, endonuclease, RNAse, alpha toxin, ricin, abrin, Pseudomonas exotoxin A, diphtheria toxin, saporin, momordin, gelonin, pokeweed antiviral protein, alpha-sarcin and cholera toxin. By “cytotoxic prodrug” is meant a non-toxic compound that is converted by an enzyme, normally present in the cell, into a cytotoxic compound. Cytotoxic prodrugs that may be used according to the methods of the invention include, but are not limited to, glutamyl derivatives of benzoic acid mustard alkylating agent, phosphate derivatives of etoposide or mitomycin C, cytosine arabinoside, daunorubisin, and phenoxyacetamide derivatives of doxorubicin.

[0821] Drug Screening

[0822] Further contemplated is the use of the polypeptides of the present invention, or the polynucleotides encoding these polypeptides, to screen for molecules, which modify the activities of the polypeptides of the present invention. Such a method would include contacting the polypeptide of the present invention with a selected compound(s) suspected of having antagonist or agonist activity, and assaying the activity of these polypeptides following binding.

[0823] This invention is particularly useful for screening therapeutic compounds by using the polypeptides of the present invention, or binding fragments thereof, in any of a variety of drug screening techniques. The polypeptide or fragment employed in such a test may be affixed to a solid support, expressed on a cell surface, free in solution, or located intracellularly. One method of drug screening utilizes eukaryotic or prokaryotic host cells which are stably transformed with recombinant nucleic acids expressing the polypeptide or fragment. Drugs are screened against such transformed cells in competitive binding assays. One may measure, for example, the formulation of complexes between the agent being tested and a polypeptide of the present invention.

[0824] Thus, the present invention provides methods of screening for drugs or any other agents, which affect activities mediated by the polypeptides of the present invention. These methods comprise contacting such an agent with a polypeptide of the present invention or a fragment thereof and assaying for the presence of a complex between the agent and the polypeptide or a fragment thereof, by methods well known in the art. In such a competitive binding assay, the agents to screen are typically labeled. Following incubation, free agent is separated from that present in bound form, and the amount of free or uncomplexed label is a measure of the ability of a particular agent to bind to the polypeptides of the present invention.

[0825] Another technique for drug screening provides high throughput screening for compounds having suitable binding affinity to the polypeptides of the present invention, and is described in great detail in European Patent Application 84/03564, published on Sep. 13, 1984, which is incorporated herein by reference herein. Briefly stated, large numbers of different small peptide test compounds are synthesized on a solid substrate, such as plastic pins or some other surface. The peptide test compounds are reacted with polypeptides of the present invention and washed. Bound polypeptides are then detected by methods well known in the art. Purified polypeptides are coated directly onto plates for use in the aforementioned drug screening techniques. In addition, non-neutralizing antibodies may be used to capture the peptide and immobilize it on the solid support.

[0826] This invention also contemplates the use of competitive drug screening assays in which neutralizing antibodies capable of binding polypeptides of the present invention specifically compete with a test compound for binding to the polypeptides or fragments thereof. In this manner, the antibodies are used to detect the presence of any peptide, which shares one or more antigenic epitopes with a polypeptide of the invention.

[0827] Antisense And Ribozyme (Antagonists)

[0828] In specific embodiments, antagonists according to the present invention are nucleic acids corresponding to the sequences contained in SEQ ID NO: X, or the complementary strand thereof, and/or to cDNA sequences contained in cDNA Clone ID NO: Z identified for example, in Table 1A. In one embodiment, antisense sequence is generated internally, by the organism, in another embodiment, the antisense sequence is separately administered (see, for example, O'Connor, J., Neurochem. 56:560 (1991). Oligodeoxynucleotides as Antisense Inhibitors of Gene Expression, CRC Press, Boca Raton, Fla. (1988). Antisense technology can be used to control gene expression through antisense DNA or RNA, or through triple-helix formation. Antisense techniques are discussed for example, in Okano, J., Neurochem. 56:560 (1991); Oligodeoxynucleotides as Antisense Inhibitors of Gene Expression, CRC Press, Boca Raton, Fla. (1988). Triple helix formation is discussed in, for instance, Lee et al., Nucleic Acids Research.6:3073 (1979); Cooney et al., Science 241:456 (1988); and Dervan et al., Science 251:1300 (1991). The methods are based on binding of a polynucleotide to a complementary DNA or RNA.

[0829] For example, the use of c-myc and c-myb antisense RNA constructs to inhibit the growth of the non-lymphocytic leukemia cell line HL-60 and other cell lines was previously described. (Wickstrom et al. (1988); Anfossi et al. (1989)). These experiments were performed in vitro by incubating cells with the oligoribonucleotide. A similar procedure for in vivo use is described in WO 91/15580. Briefly, a pair of oligonucleotides for a given antisense RNA is produced as follows: A sequence complimentary to the first 15 bases of the open reading frame is flanked by an EcoR1 site on the 5′ end and a HindIll site on the 3′ end. Next, the pair of oligonucleotides is heated at 90° C. for one minute and then annealed in 2×ligation buffer (20 mM TRIS HCl pH 7.5, 10 mM MgC12, 10 MM dithiothreitol (DTT) and 0.2 mM ATP) and then ligated to the EcoR1/Hind III site of the retroviral vector PMV7 (WO 91/15580).

[0830] For example, the 5′ coding portion of a polynucleotide that encodes the polypeptide of the present invention may be used to design an antisense RNA oligonucleotide of from about 10 to 40 base pairs in length. A DNA oligonucleotide is designed to be complementary to a region of the gene involved in transcription thereby preventing transcription and the production of the receptor. The antisense RNA oligonucleotide hybridizes to the mRNA in vivo and blocks translation of the mRNA molecule into receptor polypeptide.

[0831] In one embodiment, the antisense nucleic acid of the invention is produced intracellularly by transcription from an exogenous sequence. For example, a vector or a portion thereof, is transcribed, producing an antisense nucleic acid (RNA) of the invention. Such a vector would contain a sequence encoding the antisense nucleic acid. Such a vector can remain episomal or become chromosomally integrated, as long as it can be transcribed to produce the desired antisense RNA. Such vectors can be constructed by recombinant DNA technology methods standard in the art. Vectors can be plasmid, viral, or others known in the art, used for replication and expression in vertebrate cells. Expression of the sequence encoding the polypeptide of the present invention or fragments thereof, can be by any promoter known in the art to act in vertebrate, preferably human cells. Such promoters can be inducible or constitutive. Such promoters include, but are not limited to, the SV40 early promoter region (Bernoist and Chambon, Nature 29:304-310 (1981), the promoter contained in the 3′ long terminal repeat of Rous sarcoma virus (Yamamoto et al., Cell 22:787-797 (1980), the herpes thymidine promoter (Wagner et al., Proc. Natl. Acad. Sci. U.S.A. 78:1441-1445 (1981), the regulatory sequences of the metallothionein gene (Brinster, et al., Nature 296:39-42 (1982)), etc.

[0832] The antisense nucleic acids of the invention comprise a sequence complementary to at least a portion of an RNA transcript of a gene of the present invention. However, absolute complementarity, although preferred, is not required. A sequence “complementary to at least a portion of an RNA,” referred to herein, means a sequence having sufficient complementarity to be able to hybridize with the RNA, forming a stable duplex; in the case of double stranded antisense nucleic acids, a single strand of the duplex DNA may thus be tested, or triplex formation may be assayed. The ability to hybridize will depend on both the degree of complementarity and the length of the antisense nucleic acid. Generally, the larger the hybridizing nucleic acid, the more base mismatches with a RNA it may contain and still form a stable duplex (or triplex as the case may be). One skilled in the art can ascertain a tolerable degree of mismatch by use of standard procedures to determine the melting point of the hybridized complex.

[0833] Oligonucleotides that are complementary to the 5′ end of the message, e.g., the 5′ untranslated sequence up to and including the AUG initiation codon, should work most efficiently at inhibiting translation. However, sequences complementary to the 3′ untranslated sequences of mRNAs have been shown to be effective at inhibiting translation of mRNAs as well. See generally, Wagner, R., 1994, Nature 372:333-335. Thus, oligonucleotides complementary to either the 5′- or 3′-non-translated, non-coding regions of polynucleotide sequences described herein could be used in an antisense approach to inhibit translation of endogenous mRNA. Oligonucleotides complementary to the 5′ untranslated region of the mRNA should include the complement of the AUG start codon. Antisense oligonucleotides complementary to mRNA coding regions are less efficient inhibitors of translation but could be used in accordance with the invention. Whether designed to hybridize to the 5′-, 3′- or coding region of mRNA of the present invention, antisense nucleic acids should be at least six nucleotides in length, and are preferably oligonucleotides ranging from 6 to about 50 nucleotides in length. In specific aspects the oligonucleotide is at least 10 nucleotides, at least 17 nucleotides, at least 25 nucleotides or at least 50 nucleotides.

[0834] The polynucleotides of the invention can be DNA or RNA or chimeric mixtures or derivatives or modified versions thereof, single-stranded or double-stranded. The oligonucleotide can be modified at the base moiety, sugar moiety, or phosphate backbone, for example, to improve stability of the molecule, hybridization, etc. The oligonucleotide may include other appended groups such as peptides (e.g., for targeting host cell receptors in vivo), or agents facilitating transport across the cell membrane (see, e.g., Letsinger et al., 1989, Proc. Natl. Acad. Sci. U.S.A. 86:6553-6556; Lemaitre et al., 1987, Proc. Natl. Acad. Sci. 84:648-652; PCT Publication No. WO88/09810, published Dec. 15, 1988) or the blood-brain barrier (see, e.g., PCT Publication No. WO89/10134, published Apr. 25, 1988), hybridization-triggered cleavage agents. (See, e.g., Krol et al., 1988, BioTechniques 6:958-976) or intercalating agents. (See, e.g., Zon, 1988, Pharm. Res. 5:539-549). To this end, the oligonucleotide may be conjugated to another molecule, e.g., a peptide, hybridization triggered cross-linking agent, transport agent, hybridization-triggered cleavage agent, etc.

[0835] The antisense oligonucleotide may comprise at least one modified base moiety which is selected from the group including, but not limited to, 5-fluorouracil, 5-bromouracil, 5-chlorouracil, 5-iodouracil, hypoxanthine, xantine, 4-acetylcytosine, 5-(carboxyhydroxylmethyl) uracil, 5-carboxymethylaminomethyl-2-thiouridine, 5-carboxymethylaminomethyluracil, dihydrouracil, beta-D-galactosylqueosine, inosine, N6-isopentenyladenine, 1-methylguanine, 1-methylinosine, 2,2-dimethylguanine, 2-methyladenine, 2-methylguanine, 3-methylcytosine, 5-methylcytosine, N6-adenine, 7-methylguanine, 5-methylaminomethyluracil, 5-methoxyaminomethyl-2-thiouracil, beta-D-mannosylqueosine, 5′-methoxycarboxymethyluracil, 5-methoxyuracil, 2-methylthio-N6-isopentenyladenine, uracil-5-oxyacetic acid (v), wybutoxosine, pseudouracil, queosine, 2-thiocytosine, 5-methyl-2-thiouracil, 2-thiouracil, 4-thiouracil, 5-methyluracil, uracil-5-oxyacetic acid methylester, uracil-5-oxyacetic acid (v), 5-methyl-2-thiouracil, 3-(3 -amino-3-N-2-carboxypropyl) uracil, (acp3)w, and 2,6-diaminopurine.

[0836] The antisense oligonucleotide may also comprise at least one modified sugar moiety selected from the group including, but not limited to, arabinose, 2-fluoroarabinose, xylulose, and hexose.

[0837] In yet another embodiment, the antisense oligonucleotide comprises at least one modified phosphate backbone selected from the group including, but not limited to, a phosphorothioate, a phosphorodithioate, a phosphoramidothioate, a phosphoramidate, a phosphordiamidate, a methylphosphonate, an alkyl phosphotriester, and a formacetal or analog thereof.

[0838] In yet another embodiment, the antisense oligonucteotide is an a-anomeric oligonucleotide. An a-anomeric oligonucleotide forms specific double-stranded hybrids with complementary RNA in which, contrary to the usual b-units, the strands run parallel to each other (Gautier et al., 1987, Nucl. Acids Res. 15:6625-6641). The oligonucleotide is a 2′-0-methylribonucleotide (Inoue et al., 1987, Nucl. Acids Res. 15:6131-6148), or a chimeric RNA-DNA analogue (Inoue et al., 1987, FEBS Lett. 215:327-330).

[0839] Polynucleotides of the invention may be synthesized by standard methods known in the art, e.g. by use of an automated DNA synthesizer (such as are commercially available from Biosearch, Applied Biosystems, etc.). As examples, phosphorothioate oligonucleotides may be synthesized by the method of Stein et al. (1988, Nucl. Acids Res. 16:3209), methylphosphonate oligonucleotides can be prepared by use of controlled pore glass polymer supports (Sarin et al., 1988, Proc. Natl. Acad. Sci. U.S.A. 85:7448-7451), etc.

[0840] While antisense nucleotides complementary to the coding region sequence could be used, those complementary to the transcribed untranslated region are most preferred.

[0841] Potential antagonists according to the invention also include catalytic RNA, or a ribozyme (See, e.g., PCT International Publication WO 90/11364, published Oct. 4, 1990; Sarver et al, Science 247:1222-1225 (1990). While ribozymes that cleave mRNA at site specific recognition sequences can be used to destroy mRNAs, the use of hammerhead ribozymes is preferred. Hammerhead ribozymes cleave mRNAs at locations dictated by flanking regions that form complementary base pairs with the target mRNA. The sole requirement is that the target mRNA have the following sequence of two bases: 5′-UG-3′. The construction and production of hammerhead ribozymes is well known in the art and is described more fully in Haseloff and Gerlach, Nature 334:585-591 (1988). There are numerous potential hammerhead ribozyme cleavage sites within the nucleotide sequence of SEQ ID NO: X. Preferably, the ribozyme is engineered so that the cleavage recognition site is located near the 5′ end of the mRNA; i.e., to increase efficiency and minimize the intracellular accumulation of non-functional mRNA transcripts.

[0842] As in the antisense approach, the ribozymes of the invention can be composed of modified oligonucleotides (e.g. for improved stability, targeting, etc.) and should be delivered to cells, which express in vivo. DNA constructs encoding the ribozyme may be introduced into the cell in the same manner as described above for the introduction of antisense encoding DNA. A preferred method of delivery involves using a DNA construct “encoding” the ribozyme under the control of a strong constitutive promoter, such as, for example, pol III or pol II promoter, so that transfected cells will produce sufficient quantities of the ribozyme to destroy endogenous messages and inhibit translation. Since ribozymes unlike antisense molecules, are catalytic, a lower intracellular concentration is required for efficiency.

[0843] Antagonist/agonist compounds may be employed to inhibit the cell growth and proliferation effects of the polypep ides of the present invention on neoplastic cells and tissues, i.e. stimulation of angiogenesis of tumors, and, therefore, retard or prevent abnormal cellular growth and proliferation, for example, in tumor formation or growth.

[0844] The antagonist/agonist may also be employed to prevent hyper-vascular diseases, and prevent the proliferation of epithelial lens cells after extracapsular cataract surgery. Prevention of the mitogenic activity of the polypeptides of the present invention may also be desirous in cases such as restenosis after balloon angioplasty.

[0845] The antagonist/agonist may also be employed to prevent the growth of scar tissue during wound healing.

[0846] The antagonist/agonist may also be employed to treat the diseases described herein.

[0847] Thus, the invention provides a method of treating disorders or diseases, including but not limited to the disorders or diseases listed throughout this application, associated with overexpression of a polynucleotide of the present invention by administering to a patient (a) an antisense molecule directed to the polynucleotide of the present invention, and/or (b) a ribozyme directed to the polynucleotide of the present invention.

[0848] Binding Peptides and Other Molecules

[0849] The invention also encompasses screening methods for identifying polypeptides and nonpolypeptides that bind excretory system antigen polypeptides, and the excretory system antigen binding molecules identified thereby. These binding molecules are useful, for example, as agonists and antagonists of the excretory system antigen polypeptides. Such agonists and antagonists can be used, in accordance with the invention, in the therapeutic embodiments described in detail, below.

[0850] This method comprises the steps of:

[0851] contacting excretory system antigen polypeptides or excretory system antigen-like polypeptides with a plurality of molecules; and

[0852] identifying a molecule that binds the excretory system antigen polypeptides or excretory system antigen-like polypeptides.

[0853] The step of contacting the excretory system antigen polypeptides or excretory system antigen-like polypeptides with the plurality of molecules may be effected in a number of ways. For example, one may contemplate immobilizing the excretory system antigen polypeptides or excretory system antigen-like polypeptides on a solid support and bringing a solution of the plurality of molecules in contact with the immobilized excretory system antigen polypeptides or excretory system antigen-like polypeptides. Such a procedure would be akin to an affinity chromatographic process, with the affinity matrix being comprised of the immobilized excretory system antigen polypeptides or excretory system antigen-like polypeptides. The molecules having a selective affinity for the excretory system antigen polypeptides or excretory system antigen-like polypeptides can then be purified by affinity selection. The nature of the solid support, process for attachment of the excretory system antigen polypeptides or excretory system antigen-like polypeptides to the solid support, solvent, and conditions of the affinity isolation or selection are largely conventional and well known to those of ordinary skill in the art.

[0854] Alternatively, one may also separate a plurality of polypeptides into substantially separate fractions comprising a subset of or individual polypeptides. For instance, one can separate the plurality of polypeptides by gel electrophoresis, column chromatography, or like method known to those of ordinary skill for the separation of polypeptides. The individual polypeptides can also be produced by a transformed host cell in such a way as to be expressed on or about its outer surface (e.g., a recombinant phage). Individual isolates can then be “probed” by the excretory system antigen polypeptides or excretory system antigen-like polypeptides, optionally in the presence of an inducer should one be required for expression, to determine if any selective affinity interaction takes place between the excretory system antigen polypeptides or excretory system antigen-like polypeptides and the individual clone. Prior to contacting the excretory system antigen polypeptides or excretory system antigen-like polypeptides with each fraction comprising individual polypeptides, the polypeptides could first be transferred to a solid support for additional convenience. Such a solid support may simply be a piece of filter membrane, such as one made of nitrocellulose or nylon. In this manner, positive clones could be identified from a collection of transformed host cells of an expression library, which harbor a DNA construct encoding a polypeptide having a selective affinity for excretory system antigen polypeptides or excretory system antigen-like polypeptides. Furthermore, the amino acid sequence of the polypeptide having a selective affinity for the excretory system antigen polypeptides or excretory system antigen-like polypeptides can be determined directly by conventional means or the coding sequence of the DNA encoding the polypeptide can frequently be determined more conveniently. The primary sequence can then be deduced from the corresponding DNA sequence. If the amino acid sequence is to be determined from the polypeptide itself, one may use microsequencing techniques. The sequencing technique may include mass spectroscopy.

[0855] In certain situations, it may be desirable to wash away any unbound excretory system antigen polypeptides or excretory system antigen-like polypeptides, or alternatively, unbound potypeptides, from a mixture of the excretory system antigen polypeptides or excretory system antigen-like polypeptides and the plurality of polypeptides prior to attempting to determine or to detect the presence of a selective affinity interaction. Such a wash step may be particularly desirable when the excretory system antigen polypeptides or excretory system antigen-like polypeptides or the plurality of polypeptides is bound to a solid support.

[0856] The plurality of molecules provided according to this method may be provided by way of diversity libraries, such as random or combinatorial peptide or nonpeptide libraries, which can be screened for molecules that specifically bind excretory system antigen polypeptides. Many libraries are known in the art that can be used, e.g., chemically synthesized libraries, recombinant (e.g., phage display libraries), and in vitro translation-based libraries. Examples of chemically synthesized libraries are described in Fodor et al., 1991, Science 251:767-773; Houghten et al., 1991, Nature 354:84-86; Lam et al., 1991, Nature 354:82-84; Medynski, 1994, Bio/Technology 12:709-710;Gallop et al., 1994, J. Medicinal Chemistry 37(9):1233-1251; Ohlmeyer et al., 1993, Proc. Natl. Acad. Sci. USA 90:10922-10926; Erb et al., 1994, Proc. Natl. Acad. Sci. USA 91:11422-11426; Houghten et al., 1992, Biotechniques 13:412; Jayawickreme et al., 1994, Proc. Natl. Acad. Sci. USA 91:1614-1618; Salmon et al., 1993, Proc. Natl. Acad. Sci. USA 90:11708-11712; PCT Publication No. WO 93/20242; and Brenner and Lemer, 1992, Proc. Natl. Acad. Sci. USA 89:5381-5383.

[0857] Examples of phage display libraries are described in Scott and Smith, 1990, Science 249:386-390; Devlin et al., 1990, Science, 249:404-406; Christian, R. B., et al., 1992, J. Mol. Biol. 227:711-718); Lenstra, 1992, J. Immunol. Meth. 152:149-157; Kay et al., 1993, Gene 128:59-65; and PCT Publication No. WO 94/18318 dated Aug. 18, 1994.

[0858] In vitro translation-based libraries include but are not limited to those described in PCT Publication No. WO 91/05058 dated Apr. 18, 1991; and Mattheakis et al., 1994, Proc. Natl. Acad. Sci. USA 91:9022-9026.

[0859] By way of examples of nonpeptide libraries, a benzodiazepine library (see e.g., Bunin et al., 1994, Proc. Natl. Acad. Sci. USA 91:4708-4712) can be adapted for use. Peptoid libraries (Simon et al., 1992, Proc. Natl. Acad. Sci. USA 89:9367-9371) can also be used. Another example of a library that can be used, in which the amide functionalities in peptides have been permethylated to generate a chemically transformed combinatorial library, is described by Ostresh et al. (1994, Proc. Natl. Acad. Sci. USA 91:11138-11142).

[0860] The variety of non-peptide libraries that are useful in the present invention is great. For example, Ecker and Crooke, 1995, Bio/Technology 13:351-360 list benzodiazepines, hydantoins, piperazinediones, biphenyls, sugar analogs, beta-mercaptoketones, arylacetic acids, acylpiperidines, benzopyrans, cubanes, xanthines, aminimides, and oxazolones as among the chemical species that form the basis of various libraries.

[0861] Non-peptide libraries can be classified broadly into two types: decorated monomers and oligomers. Decorated monomer libraries employ a relatively simple scaffold structure upon which a variety functional groups is added. Often the scaffold will be a molecule with a known useful pharmacological activity. For example, the scaffold might be the benzodiazepine structure.

[0862] Non-peptide oligomer libraries utilize a large number of monomers that are assembled together in ways that create new shapes that depend on the order of the monomers. Among the monomer units that have been used are carbamates, pyrrolinones, and morpholinos. Peptoids, peptide-like oligomers in which the side chain is attached to the alpha amino group rather than the alpha carbon, form the basis of another version of non-peptide oligomer libraries. The first non-peptide oligomer libraries utilized a single type of monomer and thus contained a repeating backbone. Recent libraries have utilized more than one monomer, giving the libraries added flexibility.

[0863] Screening the libraries can be accomplished by any of a variety of commonly known methods. See, e.g., the following references, which disclose screening of peptide libraries: Parmley and Smith, 1989, Adv. Exp. Med. Biol. 251:215-218; Scott and Smith, 1990, Science 249:386-390; Fowlkes et al., 1992; BioTechniques 13:422-427; Oldenburg et al., 1992, Proc. Natl. Acad. Sci. USA 89:5393-5397; Yu et al., 1994, Cell 76:933-945; Staudt et al., 1988, Science 241:577-580; Bock et al., 1992, Nature 355:564-566; Tuerk et al., 1992, Proc. Natl. Acad. Sci. USA 89:6988-6992; Ellington et al., 1992, Nature 355:850-852; U.S. Pat. No. 5,096,815, U.S. Pat. No. 5,223,409, and U.S. Pat. No. 5,198,346, all to Ladner et al.; Rebar and Pabo, 1993, Science 263:671-673; and CT Publication No. WO 94/18318.

[0864] In a specific embodiment, screening to identify a molecule that binds excretory system antigen polypeptides can be carried out by contacting the library members with an excretory system antigen polypeptides or excretory system antigen-like polypeptides immobilized on a solid phase and harvesting those library members that bind to the excretory system antigen polypeptides or excretory system antigen-like polypeptides. Examples of such screening methods, termed “panning” techniques are described by way of example in Parmley and Smith, 1988, Gene 73:305-318; Fowlkes et al., 1992, BioTechniques 13:422-427; International Publication No. WO 94/18318; and in references cited herein.

[0865] In another embodiment, the two-hybrid system for selecting interacting proteins in yeast (Fields and Song, 1989, Nature 340:245-246; Chien et al., 1991, Proc. Natl. Acad. Sci. USA 88:9578-9582) can be used to identify molecules that specifically bind to excretory system antigen polypeptides or excretory system antigen-like polypeptides.

[0866] Where the excretory system antigen binding molecule is a polypeptide, the polypeptide can be conveniently selected from any peptide library, including random peptide libraries, combinatorial peptide libraries, or biased peptide libraries. The term “biased” is used herein to mean that the method of generating the library is manipulated so as to restrict one or more parameters that govern the diversity of the resulting collection of molecules, in this case peptides.

[0867] Thus, a truly random peptide library would generate a collection of peptides in which the probability of finding a particular amino acid at a given position of the peptide is the same for all 20 amino acids. A bias can be introduced into the library, however, by specifying, for example, that a lysine occurs every fifth amino acid or that positions 4, 8, and 9 of a decapeptide library be fixed to include only arginine. Clearly, many types of biases can be contemplated, and the present invention is not restricted to any particular bias. Furthermore, the present invention contemplates specific types of peptide libraries, such as phage displayed peptide libraries and those that utilize a DNA construct comprising a lambda phage vector with a DNA insert.

[0868] As mentioned above, in the case of an excretory system antigen binding molecule that is a polypeptide, the polypeptide may have about 6 to less than about 60 amino acid residues, preferably about 6 to about 10 amino acid residues, and most preferably, about 6 to about 22 amino acids. In another embodiment, an excretory system antigen binding polypeptide has in the range of 15-100 amino acids, or 20-50 amino acids.

[0869] The selected excretory system antigen binding polypeptide can be obtained by chemical synthesis or recombinant expression.

[0870] Other Activities

[0871] A polypeptide, polynucleotide, agonist, or antagonist of the present invention, as a result of the ability to stimulate vascular endothelial cell growth, may be employed in treatment for stimulating re-vascularization of ischemic tissues due to various disease conditions such as thrombosis, arteriosclerosis, and other cardiovascular conditions. The polypeptide, polynucleotide, agonist, or antagonist of the present invention may also be employed to stimulate angiogenesis and limb regeneration, as discussed above.

[0872] A polypeptide, polynucleotide, agonist, or antagonist of the present invention may also be employed for treating wounds due to injuries, burns, post-operative tissue repair, and ulcers since they are mitogenic to various cells of different origins, such as fibroblast cells and skeletal muscle cells, and therefore, facilitate the repair or replacement of damaged or diseased tissue.

[0873] A polypeptide, polynucleotide, agonist, or antagonist of the present invention may also be employed to stimulate neuronal growth and to treat and prevent neuronal damage which occurs in certain neuronal disorders or neuro-degenerative conditions such as Alzheimer's disease, Parkinson's disease, and AIDS-related complex. A polypeptide, polynucleotide, agonist, or antagonist of the present invention may have the ability to stimulate chondrocyte growth; therefore, they may be employed to enhance bone and periodontal regeneration and aid in tissue transplants or bone grafts.

[0874] A polypeptide, polynucleotide, agonist, or antagonist of the present invention may be also be employed to prevent skin aging due to sunburn by stimulating keratinocyte growth.

[0875] A polypeptide, polynucleotide, agonist, or antagonist of the present invention may also be employed for preventing hair loss, since FGF family members activate hair-forming cells and promotes melanocyte growth. Along the same lines, a polypeptide, polynucleotide, agonist, or antagonist of the present invention may be employed to stimulate growth and differentiation of hematopoietic cells and bone marrow cells when used in combination with other cytokines.

[0876] A polypeptide, polynucleotide, agonist, or antagonist of the present invention may also be employed to maintain organs before transplantation or for supporting cell culture of primary tissues. A polypeptide, polynucleotide, agonist, or antagonist of the present invention may also be employed for inducing tissue of mesodermal origin to differentiate in early embryos.

[0877] A polypeptide, polynucleotide, agonist, or antagonist of the present invention may also increase or decrease the differentiation or proliferation of embryonic stem cells, besides, as discussed above, hematopoietic lineage.

[0878] A polypeptide, polynucleotide, agonist, or antagonist of the present invention may also be used to modulate mammalian characteristics, such as body height, weight, hair color, eye color, skin, percentage of adipose tissue, pigmentation, size, and shape (e.g., cosmetic surgery). Similarly, a polypeptide, polynucleotide, agonist, or antagonist of the present invention may be used to modulate mammalian metabolism affecting catabolism, anabolism, processing, utilization, and storage of energy.

[0879] A polypeptide, polynucleotide, agonist, or antagonist of the present invention may be used to change a mammal's mental state or physical state by influencing biorhythms, caricadic rhythms, depression (including depressive disorders), tendency for violence, tolerance for pain, reproductive capabilities (preferably by Activin or Inhibin-like activity), hormonal or endocrine levels, appetite, libido, memory, stress, or other cognitive qualities.

[0880] A polypeptide, polynucleotide, agonist, or antagonist of the present invention may also be used as a food additive or preservative, such as to increase or decrease storage capabilities, fat content, lipid, protein, carbohydrate, vitamins, minerals, cofactors or other nutritional components.

[0881] The above-recited applications have uses in a wide variety of hosts. Such hosts include, but are not limited to, human, murine, rabbit, goat, guinea pig, camel, horse, mouse, rat, hamster, pig, micro-pig, chicken, goat, cow, sheep, dog, cat, non-human primate, and human. In specific embodiments, the host is a mouse, rabbit, goat, guinea pig, chicken, rat, hamster, pig, sheep, dog or cat. In preferred embodiments, the host is a mammal. In most preferred embodiments, the host is a human.

[0882] Other Preferred Embodiments

[0883] Other preferred embodiments of the claimed invention include an isolated nucleic acid molecule comprising a nucleotide sequence which is at least 95% identical to a sequence of at least about 50 contiguous nucleotides in the nucleotide sequence of SEQ ID NO: X or the complementary strand thereto, the nucleotide sequence as defined in column 4 of Table 1A or columns 8 and 9 of Table 2 or the complementary strand thereto, and/or cDNA contained in Clone ID NO: Z.

[0884] Also preferred is a nucleic acid molecule wherein said sequence of contiguous nucleotides is included in the nucleotide sequence of the portion of SEQ ID NO: X as defined in column 4, “ORF (From-To)”, in Table 1A.

[0885] Also preferred is a nucleic acid molecule wherein said sequence of contiguous nucleotides is included in the nucleotide sequence of the portion of SEQ ID NO: X as defined in columns 8 and 9, “NT From” and “NT To” respectively, in Table 2.

[0886] Also preferred is an isolated nucleic acid molecule comprising a nucleotide sequence which is at least 95% identical to a sequence of at least about 150 contiguous nucleotides in the nucleotide sequence of SEQ ID NO: X or the complementary strand thereto, the nucleotide sequence as defined in column 4 of Table 1A or columns 8 and 9 of Table 2 or the complementary strand thereto, and/or cDNA contained in Clone ID NO: Z.

[0887] Further preferred is an isolated nucleic acid molecule comprising a nucleotide sequence which is at least 95% identical to a sequence of at least about 500 contiguous nucleotides in the nucleotide sequence of SEQ ID NO: X or the complementary strand thereto, the nucleotide sequence as defined in column 4 of Table 1A or columns 8 and 9 of Table 2 or the complementary strand thereto, and/or cDNA contained in Clone ID NO: Z.

[0888] A further preferred embodiment is a nucleic acid molecule comprising a nucleotide sequence which is at least 95% identical to the nucleotide sequence of the portion of SEQ ID NO: X defined in column 4, “ORF (From-To)”, in Table 1A.

[0889] A further preferred embodiment is a nucleic acid molecule comprising a nucleotide sequence which is at least 95% identical to the nucleotide sequence of the portion of SEQ ID NO: X defined in columns 8 and 9, “NT From” and “NT To”, respectively, in Table 2.

[0890] A further preferred embodiment is an isolated nucleic acid molecule comprising a nucleotide sequence which is at least 95% identical to the complete nucleotide sequence of SEQ ID NO: X or the complementary strand thereto, the nucleotide sequence as defined in column 4 of Table 1A or columns 8 and 9 of Table 2 or the complementary strand thereto, and/or cDNA contained in Clone ID NO: Z.

[0891] Also preferred is an isolated nucleic acid molecule which hybridizes under stringent hybridization conditions to a nucleic acid molecule comprising a nucleotide sequence of SEQ ID NO: X or the complementary strand thereto, the nucleotide sequence as defined in column 4 of Table 1A or columns 8 and 9 of Table 2 or the complementary strand thereto, and/or cDNA contained in Clone ID NO: Z, wherein said nucleic acid molecule which hybridizes does not hybridize under stringent hybridization conditions to a nucleic acid molecule having a nucleotide sequence consisting of only A residues or of only T residues.

[0892] Also preferred is a composition of matter comprising a DNA molecule which comprises the cDNA contained in Clone ID NO: Z.

[0893] Also preferred is an isolated nucleic acid molecule comprising a nucleotide sequence which is at least 95% identical to a sequence of at least 50 contiguous nucleotides of the cDNA sequence contained in Clone ID NO: Z.

[0894] Also preferred is an isolated nucleic acid molecule, wherein said sequence of at least 50 contiguous nucleotides is included in the nucleotide sequence of an open reading frame sequence encoded by cDNA contained in Clone ID NO: Z.

[0895] Also preferred is an isolated nucleic acid molecule comprising a nucleotide sequence which is at least 95% identical to sequence of at least 150 contiguous nucleotides in the nucleotide sequence encoded by cDNA contained in Clone ID NO: Z.

[0896] A further preferred embodiment is an isolated nucleic acid molecule comprising a nucleotide sequence which is at least 95% identical to sequence of at least 500 contiguous nucleotides in the nucleotide sequence encoded by cDNA contained in Clone ID NO: Z.

[0897] A further preferred embodiment is an isolated nucleic acid molecule comprising a nucleotide sequence which is at least 95% identical to the complete nucleotide sequence encoded by cDNA contained in Clone ID NO: Z.

[0898] A further preferred embodiment is a method for detecting in a biological sample a nucleic acid molecule comprising a nucleotide sequence which is at least 95% identical to a sequence of at least 50 contiguous nucleotides in a sequence selected from the group consisting of: a nucleotide sequence of SEQ ID NO: X or the complementary strand thereto; the nucleotide sequence as defined in column 4 of Table 1A or columns 8 and 9 of Table 2 or the complementary strand thereto; and a nucleotide sequence encoded by cDNA contained in Clone ID NO: Z; which method comprises a step of comparing a nucleotide sequence of at least one nucleic acid molecule in said sample with a sequence selected from said group and determining whether the sequence of said nucleic acid molecule in said sample is at least 95% identical to said selected sequence.

[0899] Also preferred is the above method wherein said step of comparing sequences comprises determining the extent of nucleic acid hybridization between nucleic acid molecules in said sample and a nucleic acid molecule comprising said sequence selected from said group. Similarly, also preferred is the above method wherein said step of comparing sequences is performed by comparing the nucleotide sequence determined from a nucleic acid molecule in said sample with said sequence selected from said group. The nucleic acid molecules can comprise DNA molecules or RNA molecules.

[0900] A further preferred embodiment is a method for identifying the species, tissue or cell type of a biological sample which method comprises a step of detecting nucleic acid molecules in said sample, if any, comprising a nucleotide sequence that is at least 95% identical to a sequence of at least 50 contiguous nucleotides in a sequence selected from the group consisting of: a nucleotide sequence of SEQ ID NO: X or the complementary strand thereto; the nucleotide sequence as defined in column 4 of Table 1A or columns 8 and 9 of Table 2 or the complementary strand thereto; and a nucleotide sequence of the cDNA contained in Clone ID NO: Z.

[0901] The method for identifying the species, tissue or cell type of a biological sample can comprise a step of detecting nucleic acid molecules comprising a nucleotide sequence in a panel of at least two nucleotide sequences, wherein at least one sequence in said panel is at least 95% identical to a sequence of at least 50 contiguous nucleotides in a sequence selected from said group.

[0902] Also preferred is a method for diagnosing in a subject a pathological condition associated with abnormal structure or expression of a nucleotide sequence of SEQ ID NO: X or the complementary strand thereto; the nucleotide sequence as defined in column 4 of Table 1A or columns 8 and 9 of Table 2 or the complementary strand thereto; or the cDNA contained in Clone ID NO: Z which encodes a protein, wherein the method comprises a step of detecting in a biological sample obtained from said subject nucleic acid molecules, if any, comprising a nucleotide sequence that is at least 95% identical to a sequence of at least 50 contiguous nucleotides in a sequence selected from the group consisting of: a nucleotide sequence of SEQ ID NO: X or the complementary strand thereto; the nucleotide sequence as defined in column 4 of Table 1A or columns 8 and 9 of Table 2 or the complementary strand thereto; and a nucleotide sequence of cDNA contained in Clone ID NO: Z.

[0903] The method for diagnosing a pathological condition can comprise a step of detecting nucleic acid molecules comprising a nucleotide sequence in a panel of at least two nucleotide sequences, wherein at least one sequence in said panel is at least 95% identical to a sequence of at least 50 contiguous nucleotides in a sequence selected from said group.

[0904] Also preferred is a composition of matter comprising isolated nucleic acid molecules wherein the nucleotide sequences of said nucleic acid molecules comprise a panel of at least two nucleotide sequences, wherein at least one sequence in said panel is at least 95% identical to a sequence of at least 50 contiguous nucleotides in a sequence selected from the group consisting of: a nucleotide sequence of SEQ ID NO: X or the complementary strand thereto; the nucleotide sequence as defined in column 4 of Table 1A or columns 8 and 9 of Table 2 or the complementary strand thereto; and a nucleotide sequence encoded by cDNA contained in Clone ID NO: Z. The nucleic acid molecules can comprise DNA molecules or RNA molecules.

[0905] Also preferred is a composition of matter comprising isolated nucleic acid molecules wherein the nucleotide sequences of said nucleic acid molecules comprise a DNA microarray or “chip” of at least 1, 2, 3, 4, 5, 6, 7, 8, 9, 10, 15, 20, 25, 30, 40, 50, 100, 150, 200, 250, 300, 500, 1000, 2000, 3000, or 4000 nucleotide sequences, wherein at least one sequence in said DNA microarray or “chip” is at least 95% identical to a sequence of at least 50 contiguous nucleotides in a sequence selected from the group consisting of: a nucleotide sequence of SEQ ID NO: X wherein X is any integer as defined in Table 1A; and a nucleotide sequence encoded by a human cDNA clone identified by a cDNA “Clone ID” in Table 1A.

[0906] Also preferred is an isolated polypeptide comprising an amino acid sequence at least 90% identical to a sequence of at least about 10 contiguous amino acids in the polypeptide sequence of SEQ ID NO: Y; a polypeptide encoded by SEQ ID NO: X or the complementary strand thereto; the polypeptide encoded by the nucleotide sequence as defined in columns 8 and 9 of Table 2; and/or a polypeptide encoded by cDNA contained in Clone ID NO: Z.

[0907] Also preferred is an isolated polypeptide comprising an amino acid sequence at least 95% identical to a sequence of at least about 30 contiguous amino acids in the amino acid sequence of SEQ ID NO: Y; a polypeptide encoded by SEQ ID NO: X or the complementary strand thereto; the polypeptide encoded by the nucleotide sequence as defined in columns 8 and 9 of Table 2; and/or a polypeptide encoded by cDNA contained in Clone ID NO: Z.

[0908] Further preferred is an isolated polypeptide comprising an amino acid sequence at least 95% identical to a sequence of at least about 100 contiguous amino acids in the amino acid sequence of SEQ ID NO: Y; a polypeptide encoded by SEQ ID NO: X or the complementary strand thereto; the polypeptide encoded by the nucleotide sequence as defined in columns 8 and 9 of Table 2; and/or a polypeptide encoded by cDNA contained in Clone ID NO: Z.

[0909] Further preferred is an isolated polypeptide comprising an amino acid sequence at least 95% identical to the complete amino acid sequence of SEQ ID NO: Y; a polypeptide encoded by SEQ ID NO: X or the complementary strand thereto; the polypeptide encoded by the nucleotide sequence as defined in columns 8 and 9 of Table 2; and/or a polypeptide encoded by cDNA contained in Clone ID NO: Z.

[0910] Further preferred is an isolated polypeptide comprising an amino acid sequence at least 90% identical to a sequence of at least about 10 contiguous amino acids in the complete amino acid sequence of a polypeptide encoded by contained in Clone ID NO: Z

[0911] Also preferred is a polypeptide wherein said sequence of contiguous amino acids is included in the amino acid sequence of a portion of said polypeptide encoded by cDNA contained in Clone ID NO: Z; a polypeptide encoded by SEQ ID NO: X or the complementary strand thereto; the polypeptide encoded by the nucleotide sequence as defined in columns 8 and 9 of Table 2; and/or the polypeptide sequence of SEQ ID NO: Y.

[0912] Also preferred is an isolated polypeptide comprising an amino acid sequence at least 95% identical to a sequence of at least about 30 contiguous amino acids in the amino acid sequence of a polypeptide encoded by the cDNA contained in Clone ID NO: Z.

[0913] Also preferred is an isolated polypeptide comprising an amino acid sequence at least 95% identical to a sequence of at least about 100 contiguous amino acids in the amino acid sequence of a polypeptide encoded by cDNA contained in Clone ID NO: Z.

[0914] Also preferred is an isolated polypeptide comprising an amino acid sequence at least 95% identical to the amino acid sequence of a polypeptide encoded by the cDNA contained in Clone ID NO: Z.

[0915] Further preferred is an isolated antibody which binds specifically to a polypeptide comprising an amino acid sequence that is at least 90% identical to a sequence of at least 10 contiguous amino acids in a sequence selected from the group consisting of: a polypeptide sequence of SEQ ID NO: Y; a polypeptide encoded by SEQ ID NO: X or the complementary strand thereto; the polypeptide encoded by the nucleotide sequence as defined in columns 8 and 9 of Table 2; and a polypeptide encoded by the cDNA contained in Clone ID NO: Z.

[0916] Further preferred is a method for detecting in a biological sample a polypeptide comprising an amino acid sequence which is at least 90% identical to a sequence of at least 10 contiguous amino acids in a sequence selected from the group consisting of: a polypeptide sequence of SEQ ID NO: Y; a polypeptide encoded by SEQ ID NO: X or the complementary strand thereto; the polypeptide encoded by the nucleotide sequence as defined in columns 8 and 9 of Table 2; and a polypeptide encoded by the cDNA contained in Clone ID NO: Z; which method comprises a step of comparing an amino acid sequence of at least one polypeptide molecule in said sample with a sequence selected from said group and determining whether the sequence of said polypeptide molecule in said sample is at least 90% identical to said sequence of at least 10 contiguous amino acids.

[0917] Also preferred is the above method wherein said step of comparing an amino acid sequence of at least one polypeptide molecule in said sample with a sequence selected from said group comprises determining the extent of specific binding of polypeptides in said sample to an antibody which binds specifically to a polypeptide comprising an amino acid sequence that is at least 90% identical to a sequence of at least 10 contiguous amino acids in a sequence selected from the group consisting of: a polypeptide sequence of SEQ ID NO: Y; a polypeptide encoded by SEQ ID NO: X or the complementary strand thereto; the polypeptide encoded by the nucleotide sequence as defined in columns 8 and 9 of Table 2; and a polypeptide encoded by the cDNA contained in Clone ID NO: Z.

[0918] Also preferred is the above method wherein said step of comparing sequences is performed by comparing the amino acid sequence determined from a polypeptide molecule in said sample with said sequence selected from said group.

[0919] Also preferred is a method for identifying the species, tissue or cell type of a biological sample which method comprises a step of detecting polypeptide molecules in said sample, if any, comprising an amino acid sequence that is at least 90% identical to a sequence of at least 10 contiguous amino acids in a sequence selected from the group consisting of: polypeptide sequence of SEQ ID NO: Y; a polypeptide encoded by SEQ ID NO: X or the complementary strand thereto; the polypeptide encoded by the nucleotide sequence as defined in columns 8 and 9 of Table 2; and a polypeptide encoded by the cDNA contained in Clone ID NO: Z.

[0920] Also preferred is the above method for identifying the species, tissue or cell type of a biological sample, which method comprises a step of detecting polypeptide molecules comprising an amino acid sequence in a panel of at least two amino acid sequences, wherein at least one sequence in said panel is at least 90% identical to a sequence of at least 10 contiguous amino acids in a sequence selected from the above group.

[0921] Also preferred is a method for diagnosing in a subject a pathological condition associated with abnormal structure or expression of a nucleic acid sequence identified in Table 1A or Table 2 encoding a polypeptide, which method comprises a step of detecting in a biological sample obtained from said subject polypeptide molecules comprising an amino acid sequence in a panel of at least two amino acid sequences, wherein at least one sequence in said panel is at least 90% identical to a sequence of at least 10 contiguous amino acids in a sequence selected from the group consisting of: polypeptide sequence of SEQ ID NO: Y; a polypeptide encoded by SEQ ID NO: X or the complementary strand thereto; the polypeptide encoded by the nucleotide sequence as defined in columns 8 and 9 of Table 2; and a polypeptide encoded by the cDNA contained in Clone ID NO: Z.

[0922] In any of these methods, the step of detecting said polypeptide molecules includes using an antibody.

[0923] Also preferred is an isolated nucleic acid molecule comprising a nucleotide sequence which is at least 95% identical to a nucleotide sequence encoding a polypeptide wherein said polypeptide comprises an amino acid sequence that is at least 90% identical to a sequence of at least 10 contiguous amino acids in a sequence selected from the group consisting of: polypeptide sequence of SEQ ID NO: Y; a polypeptide encoded by SEQ ID NO: X or the complementary strand thereto; the polypeptide encoded by the nucleotide sequence as defined in columns 8 and 9 of Table 2; and a polypeptide encoded by the cDNA contained in Clone ID NO: Z.

[0924] Also preferred is an isolated nucleic acid molecule, wherein said nucleotide sequence encoding a polypeptide has been optimized for expression of said polypeptide in a prokaryotic host.

[0925] Also preferred is a polypeptide molecule, wherein said polypeptide comprises an amino acid sequence selected from the group consisting of: polypeptide sequence of SEQ ID NO: Y; a polypeptide encoded by SEQ ID NO: X or the complementary strand thereto; the polypeptide encoded by the nucleotide sequence as defined in columns 8 and 9 of Table 2; and a polypeptide encoded by the cDNA contained in Clone ID NO: Z.

[0926] Further preferred is a method of making a recombinant vector comprising inserting any of the above isolated nucleic acid molecule into a vector. Also preferred is the recombinant vector produced by this method. Also preferred is a method of making a recombinant host cell comprising introducing the vector into a host cell, as well as the recombinant host cell produced by this method.

[0927] Also preferred is a method of making an isolated polypeptide comprising culturing this recombinant host cell under conditions such that said polypeptide is expressed and recovering said polypeptide. Also preferred is this method of making an isolated polypeptide, wherein said recombinant host cell is a eukaryotic cell and said polypeptide is a human protein comprising an amino acid sequence selected from the group consisting of: polypeptide sequence of SEQ ID NO: Y; a polypeptide encoded by SEQ ID NO: X or the complementary strand thereto; the polypeptide encoded by the nucleotide sequence as defined in columns 8 and 9 of Table 2; and a polypeptide encoded by the cDNA contained in Clone ID NO: Z. The isolated polypeptide produced by this method is also preferred.

[0928] Also preferred is a method of treatment of an individual in need of an increased level of a protein activity, which method comprises administering to such an individual a Therapeutic comprising an amount of an isolated polypeptide, polynucleotide, immunogenic fragment or analogue thereof, binding agent, antibody, or antigen binding fragment of the claimed invention effective to increase the level of said protein activity in said individual.

[0929] Also preferred is a method of treatment of an individual in need of a decreased level of a protein activity, which method comprised administering to such an individual a Therapeutic comprising an amount of an isolated polypeptide, polynucleotide, immunogenic fragment or analogue thereof, binding agent, antibody, or antigen binding fragment of the claimed invention effective to decrease the level of said protein activity in said individual.

[0930] Also preferred is a method of treatment of an individual in need of a specific delivery of toxic compositions to diseased cells (e.g., tumors, leukemias or lymphomas), which method comprises administering to such an individual a Therapeutic comprising an amount of an isolated polypeptide of the invention, including, but not limited to a binding agent, or antibody of the claimed invention that are associated with toxin or cytotoxic prodrugs.

[0931] Having generally described the invention, the same will be more readily understood by reference to the following examples, which are provided by way of illustration and are not intended as limiting.

TABLE 6

| ATCC Deposits | Deposit Date | ATCC Designation Number |
|---|---|---|
| LP01, LP02, LP03, | May-20-97 | 209059, 209060, 209061, 209062, |
| LP04, LP05, LP06, | | 209063, 209064, 209065, 209066, |
| LP07, LP08, LP09, | | 209067, 209068, 209069 |
| LP10, LP11, | | |
| LP12 | Jan-12-98 | 209579 |
| LP13 | Jan-12-98 | 209578 |
| LP14 | Jul-16-98 | 203067 |
| LP15 | Jul-16-98 | 203068 |
| LP16 | Feb-1-99 | 203609 |
| LP17 | Feb-1-99 | 203610 |
| LP20 | Nov-17-98 | 203485 |
| LP21 | Jun-18-99 | PTA-252 |
| LP22 | Jun-18-99 | PTA-253 |
| LP23 | Dec-22-99 | PTA-1081 |

### EXAMPLES

### Example 1

### Isolation of a Selected cDNA Clone From the Deposited Sample

[0932] Each Clone ID NO: Z is contained in a plasmid. Table 7 identifies the vectors used to construct the cDNA library from which each clone was isolated. In many cases, the vector used to construct the library is a phage vector from which a plasmid has been excised. The following correlates the related plasmid for each phage vector used in constructing the cDNA library. For example, where a particular clone is identified in Table 7 as being isolated in the vector “Lambda Zap,” the corresponding deposited clone is in “pBluescript.”

| Vector Used to Construct Library | Corresponding Deposited Plasmid |
|---|---|
| Lambda Zap | pBluescript (pBS) |
| Uni-Zap XR | pBluescript (pBS) |
| Zap Express | pBK |
| lafmid BA | plafmid BA |
| pSport 1 | pSport 1 |
| pCMVSport 2.0 | pCMVSport 2.0 |
| pCMVSport 3.0 | pCMVSport 3.0 |
| pCR ®2.1 | pCR ®2.1 |

[0933] Vectors Lambda Zap (U.S. Pat. Nos. 5,128,256 and 5,286,636), Uni-Zap XR (U.S. Pat. Nos. 5,128,256 and 5,286,636), Zap Express (U.S. Pat. Nos. 5,128,256 and 5,286,636), pBluescript (pBS) (Short, J. M. et al., Nucleic Acids Res. 16:7583-7600 (1988); Alting-Mees, M. A. and Short, J. M., Nucleic Acids Res. 17:9494 (1989)) and pBK (Alting-Mees, M. A. et al., Strategies 5:58-61 (1992)) are commercially available from Stratagene Cloning Systems, Inc., 11011 N. Torrey Pines Road, La Jolla, Calif., 92037. pBS contains an ampicillin resistance gene and pBK contains a neomycin resistance gene. Both can be transformed into E. coli strain XL-1 Blue, also available from Stratagene. pBS comes in 4 forms SK+, SK−, KS+ and KS. The S and K refers to the orientation of the polylinker to the T7 and T3 primer sequences which flank the polylinker region (“S” is for SacI and “K” is for KpnI which are the first sites on each respective end of the linker). “+” or “−” refer to the orientation of the f1 origin of replication (“ori”), such that in one orientation, single stranded rescue initiated from the f1 ori generates sense strand DNA and in the other, antisense.

[0934] Vectors pSport1, pCMVSport 2.0 and pCMVSport 3.0, were obtained from Life Technologies, Inc., P.O. Box 6009, Gaithersburg, Md. 20897. All Sport vectors contain an ampicillin resistance gene and may be transformed into E. coli strain DH10B, also available from Life Technologies. (See, for instance, Gruber, C. E., et al., Focus 15:59 (1993).) Vector lafmid BA (Bento Soares, Columbia University, N.Y.) contains an ampicillin resistance gene and can be transformed into E. coli strain XL-1 Blue. Vector pCR®2.1, which is available from Invitrogen, 1600 Faraday Avenue, Carlsbad, Calif. 92008, contains an ampicillin resistance gene and may be transformed into E. coli strain DH10B, available from Life Technologies. (See, for instance, Clark, J. M., Nuc. Acids Res. 16:9677-9686 (1988) and Mead, D. et al., Bio/Technology 9: (1991).) Preferably, a polynucleotide of the present invention does not comprise the vector sequences identified for the particular clone in Table 7, as well as the corresponding plasmid vector sequences designated above.

[0935] The deposited material in the sample assigned the ATCC Deposit Number cited by reference to Tables 1A, 2, 6 and 7 for any given cDNA clone also may contain one or more additional plasmids, each comprising a cDNA clone different from that given clone. Thus, deposits sharing the same ATCC Deposit Number contain at least a plasmid for each Clone ID NO: Z.

TABLE 7

| | | | ATCC |
|---|---|---|---|
| Libraries owned by Catalog | Catalog Description | Vector | Deposit |
| HUKA HUKB HUKC HUKD HUKE | Human Uterine Cancer | Lambda ZAP II | LP01 |
| HUKF HUKG | | | |
| HCNA HCNB | Human Colon | Lambda Zap II | LP01 |
| HFFA | Human Fetal Brain, random primed | Lambda Zap II | LP01 |
| HTWA | Resting T-Cell | Lambda ZAP II | LP01 |
| HBQA | Early Stage Human Brain, random | Lambda ZAP II | LP01 |
| | primed | | |
| HLMB HLMF HLMG HLMH HLMI | breast lymph node CDNA library | Lambda ZAP II | LP01 |
| HLMJ HLMM HLMN | | | |
| HCQA HCQB | human colon cancer | Lamda ZAP II | LP01 |
| HMEA HMEC HMED HMEE HMEF | Human Microvascular Endothelial | Lambda ZAP II | LP01 |
| HMEG HMEI HMEJ HMEK HMEL | Cells, fract. A | | |
| HUSA HUSC | Human Umbilical Vein Endothelial | Lambda ZAP II | LP01 |
| | Cells, fract. A | | |
| HLQA HLQB | Hepatocellular Tumor | Lambda ZAP II | LP01 |
| HHGA HHGB HHGC HHGD | Hemangiopericytoma | Lambda ZAP II | LP01 |
| HSDM | Human Striatum Depression, re-rescue | Lambda ZAP II | LP01 |
| HUSH | H Umbilical Vein Endothelial Cells, | Lambda ZAP II | LP01 |
| | frac A, re-excision | | |
| HSGS | Salivary gland, subtracted | Lambda ZAP II | LP01 |
| HFXA HFXB HFXC HFXD HFXE | Brain frontal cortex | Lambda ZAP II | LP01 |
| HFXF HFXG HFXH | | | |
| HPQA HPQB HPQC | PERM TF274 | Lambda ZAP II | LP01 |
| HFXJ HFXK | Brain Frontal Cortex, re-excision | Lambda ZAP II | LP01 |
| HCWA HCWB HCWC HCWD HCWE | CD34 positive cells (Cord Blood) | ZAP Express | LP02 |
| HCWF HCWG HCWH HCWI HCWJ | | | |
| HCWK | | | |
| HCUA HCUB HCUC | CD34 depleted Buffy Coat (Cord | ZAP Express | LP02 |
| | Blood) | | |
| HRSM | A-14 cell line | ZAP Express | LP02 |
| HRSA | A1-CELL LINE | ZAP Express | LP02 |
| HCUD HCUE HCUF HCUG HCUH | CD34 depleted Buffy Coat (Cord | ZAP Express | LP02 |
| HCUI | Blood), re-excision | | |
| HBXE HBXF HBXG | H. Whole Brain #2, re-excision | ZAP Express | LP02 |
| HRLM | L8 cell line | ZAP Express | LP02 |
| HBXA HBXB HBXC HBXD | Human Whole Brain #2 - Oligo dT > | ZAP Express | LP02 |
| | 1.5 Kb | | |
| HUDA HUDB HUDC | Testes | ZAP Express | LP02 |
| HHTM HHTN HHTO | H. hypothalamus, frac A; re-excision | ZAP Express | LP02 |
| HHTL | H. hypothalamus, frac A | ZAP Express | LP02 |
| HASA HASD | Human Adult Spleen | Uni-ZAP XR | LP03 |
| HFKC HFKD HFKE HFKF HFKG | Human Fetal Kidney | Uni-ZAP XR | LP03 |
| HE8A HE8B HE8C HE8D HE8E HE8F | Human 8 Week Whole Embryo | Uni-ZAP XR | LP03 |
| HE8M HE8N | | | |
| HGBA HGBD HGBE HGBF HGBG | Human Gall Bladder | Uni-ZAP XR | LP03 |
| HGBH HGBI | | | |
| HLHA HLHB HLHC HLHD HLHE | Human Fetal Lung III | Uni-ZAP XR | LP03 |
| HLHF HLHG HLHH HLHQ | | | |
| HPMA HPMB HPMC HPMD HPME | Human Placenta | Uni-ZAP XR | LP03 |
| HPMF HPMG HPMH | | | |
| HPRA HPRB HPRC HPRD | Human Prostate | Uni-ZAP XR | LP03 |
| HSIA HSIC HSID HSIE | Human Adult Small Intestine | Uni-ZAP XR | LP03 |
| HTEA HTEB HTEC HTED HTEE | Human Testes | Uni-ZAP XR | LP03 |
| HTEF HTEG HTEH HTEI HTEJ HTEK | | | |
| HTPA HTPB HTPC HTPD HTPE | Human Pancreas Tumor | Uni-ZAP XR | LP03 |
| HTTA HTTB HTTC HTTD HTTE | Human Testes Tumor | Uni-ZAP XR | LP03 |
| HTTF | | | |
| HAPA HAPB HAPC HAPM | Human Adult Pulmonary | Uni-ZAP XR | LP03 |
| HETA HETB HETC HETD HETE | Human Endometrial Tumor | Uni-ZAP XR | LP03 |
| HETF HETG HETH HETI | | | |
| HHFB HHFC HHFD HHFE HHFF | Human Fetal Heart | Uni-ZAP XR | LP03 |
| HHFG HHFH HHFI | | | |
| HHPB HHPC HHPD HHPE HHPF | Human Hippocampus | Uni-ZAP XR | LP03 |
| HHPG HHPH | | | |
| HCE1 HCE2 HCE3 HCE4 HCE5 HCEB | Human Cerebellum | Uni-ZAP XR | LP03 |
| HCEC HCED HCEE HCEF HCEG | | | |
| HUVB HUVC HUVD HUVE | Human Umbilical Vein, Endo remake | Uni-ZAP XR | LP03 |
| HSTA HSTB HSTC HSTD | Human Skin Tumor | Uni-ZAP XR | LP03 |
| HTAA HTAB HTAC HTAD HTAE | Human Activated T-Cells | Uni-ZAP XR | LP03 |
| HFEA HFEB HFEC | Human Fetal Epithelium (Skin) | Uni-ZAP XR | LP03 |
| HJPA HJPB HJPC HJPD | HUMAN JURKAT MEMBRANE | Uni-ZAP XR | LP03 |
| | BOUND POLYSOMES | | |
| HESA | Human epithelioid sarcoma | Uni-Zap XR | LP03 |
| HLTA HLTB HLTC HLTD HLTE | Human T-Cell Lymphoma | Uni-ZAP XR | LP03 |
| HLTF | | | |
| HFTA HFTB HFTC HFTD | Human Fetal Dura Mater | Uni-ZAP XR | LP03 |
| HRDA HRDB HRDC HRDD HRDE | Human Rhabdomyosarcoma | Uni-ZAP XR | LP03 |
| HRDF | | | |
| HCAA HCAB HCAC | Cem cells cyclohexamide treated | Uni-ZAP XR | LP03 |
| HRGA HRGB HRGC HRGD | Raji Cells, cyclohexamide treated | Uni-ZAP XR | LP03 |
| HSUA HSUB HSUC HSUM | Supt Cells, cyclohexamide treated | Uni-ZAP XR | LP03 |
| HT4A HT4C HT4D | Activated T-Cells, 12 hrs. | Uni-ZAP XR | LP03 |
| HE9A HE9B HE9C HE9D HE9E HE9F | Nine Week Old Early Stage Human | Uni-ZAP XR | LP03 |
| HE9G HE9H HE9M HE9N | | | |
| HATA HATB HATC HATD HATE | Human Adrenal Gland Tumor | Uni-ZAP XR | LP03 |
| HT5A | Activated T-Cells, 24 hrs. | Uni-ZAP XR | LP03 |
| HFGA HFGM | Human Fetal Brain | Uni-ZAP XR | LP03 |
| HNEA HNEB HNEC HNED HNEE | Human Neutrophil | Uni-ZAP XR | LP03 |
| HBGB HBGD | Human Primary Breast Cancer | Uni-ZAP XR | LP03 |
| HBNA HBNB | Human Normal Breast | Uni-ZAP XR | LP03 |
| HCAS | Cem Cells, cyclohexamide treated; | Uni-ZAP XR | LP03 |
| | subtra | | |
| HHPS | Human Hippocampus, subtracted | pBS | LP03 |
| HKCS HKCU | Human Colon Cancer, subtracted | pBS | LP03 |
| HRGS | Raji cells, cyclohexamide treated, | pBS | LP03 |
| | subtracted | | |
| HSUT | Supt cells, cyclohexamide treated, | pBS | LP03 |
| | differentially expressed | | |
| HT4S | Activated T-Cells, 12 hrs, subtracted | Uni-ZAP XR | LP03 |
| HCDA HCDB HCDC HCDD HCDE | Human Chondrosarcoma | Uni-ZAP XR | LP03 |
| HOAA HOAB HOAC | Human Osteosarcoma | Uni-ZAP XR | LP03 |
| HTLA HTLB HTLC HTLD HTLE | Human adult testis, large inserts | Uni-ZAP XR | LP03 |
| HTLF | | | |
| HLMA HLMC HLMD | Breast Lymph node cDNA library | Uni-ZAP XR | LP03 |
| H6EA H6EB H6EC | HL-60, PMA 4H | Uni-ZAP XR | LP03 |
| HTXA HTXB HTXC HTXD HTXE | Activated T-Cell (12 hs)/Thiouridine | Uni-ZAP XR | LP03 |
| HTXF HTXG HTXH | labelledEco | | |
| HNFA HNFB HNFC HNFD HNFE | Human Neutrophil, Activated | Uni-ZAP XR | LP03 |
| HNFF HNFG HNFH HNFJ | | | |
| HTOB HTOC | HUMAN TONSILS, FRACTION 2 | Uni-ZAP XR | LP03 |
| HMGB | Human OB MG63 control fraction I | Uni-ZAP XR | LP03 |
| HOPB | Human OB HOS control fraction I | Uni-ZAP XR | LP03 |
| HORB | Human OB HOS treated (10 nM E2) | Uni-ZAP XR | LP03 |
| | fraction I | | |
| HSVA HSVB HSVC | Human Chronic Synovitis | Uni-ZAP XR | LP03 |
| HROA | HUMAN STOMACH | Uni-ZAP XR | LP03 |
| HBJA HBJB HBJC HBJD HBJE HBJF | HUMAN B CELL LYMPHOMA | Uni-ZAP XR | LP03 |
| HBJG HBJH HBJI HBJJ HBJK | | | |
| HCRA HCRB HCRC | human corpus colosum | Uni-ZAP XR | LP03 |
| HODA HODB HODC HODD | human ovarian cancer | Uni-ZAP XR | LP03 |
| HDSA | Dermatofibrosarcoma Protuberance | Uni-ZAP XR | LP03 |
| HMWA HMWB HMWC HMWD | Bone Marrow Cell Line (RS4; 11) | Uni-ZAP XR | LP03 |
| HMWE HMWF HMWG HMWH | | | |
| HMWI HMWJ | | | |
| HSOA | stomach cancer (human) | Uni-ZAP XR | LP03 |
| HERA | SKIN | Uni-ZAP XR | LP03 |
| HMDA | Brain-medulloblastoma | Uni-ZAP XR | LP03 |
| HGLA HGLB HGLD | Glioblastoma | Uni-ZAP XR | LP03 |
| HEAA | H. Atrophic Endometrium | Uni-ZAP XR | LP03 |
| HBCA HBCB | H. Lymph node breast Cancer | Uni-ZAP XR | LP03 |
| HPWT | Human Prostate BPH, re-excision | Uni-ZAP XR | LP03 |
| HFVG HFVH HFVI | Fetal Liver, subtraction II | pBS | LP03 |
| HNFI | Human Neutrophils, Activated, re- | pBS | LP03 |
| | excision | | |
| HBMB HBMC HBMD | Human Bone Marrow, re-excision | pBS | LP03 |
| HKML HKMM HKMN | H. Kidney Medulla, re-excision | pBS | LP03 |
| HKIX HKIY | H. Kidney Cortex, subtracted | pBS | LP03 |
| HADT | H. Amygdala Depression, subtracted | pBS | LP03 |
| H6AS | HI-60, untreated, subtracted | Uni-ZAP XR | LP03 |
| H6ES | HL-60, PMA 4H, subtracted | Uni-ZAP XR | LP03 |
| H6BS | HL-60, RA 4h, Subtracted | Uni-ZAP XR | LP03 |
| H6CS | HL-60, PMA 1d, subtracted | Uni-ZAP XR | LP03 |
| HTXJ HTXK | Activated T-cell(12 h)/Thiouridine-re- | Uni-ZAP XR | LP03 |
| | excision | | |
| HMSA HMSB HMSC HMSD HMSE | Monocyte activated | Uni-ZAP XR | LP03 |
| HMSF HMSG HMSH HMSI HMSJ | | | |
| HMSK | | | |
| HAGA HAGB HAGC HAGD HAGE | Human Amygdala | Uni-ZAP XR | LP03 |
| HAGF | | | |
| HSRA HSRB HSRE | STROMAL-OSTEOCLASTOMA | Uni-ZAP XR | LP03 |
| HSRD HSRF HSRG HSRH | Human Osteoclastoma Stromal Cells - | Uni-ZAP XR | LP03 |
| | unamplified | | |
| HSQA HSQB HSQC HSQD HSQE | Stromal cell TF274 | Uni-ZAP XR | LP03 |
| HSQF HSQG | | | |
| HSKA HSKB HSKC HSKD HSKE | Smooth muscle, serum treated | Uni-ZAP XR | LP03 |
| HSKF HSKZ | | | |
| HSLA HSLB HSLC HSLD HSLE | Smooth muscle, control | Uni-ZAP XR | LP03 |
| HSLF HSLG | | | |
| HSDA HSDD HSDE HSDF HSDG | Spinal cord | Uni-ZAP XR | LP03 |
| HSDH | | | |
| HPWS | Prostate-BPH subtracted II | pBS | LP03 |
| HSKW HSKX HSKY | Smooth Muscle- HASTE normalized | pBS | LP03 |
| HFPB HFPC HFPD | H. Frontal cortex, epileptic; re-excision | Uni-ZAP XR | LP03 |
| HSDI HSDJ HSDK | Spinal Cord, re-excision | Uni-ZAP XR | LP03 |
| HSKN HSKO | Smooth Muscle Serum Treated, Norm | pBS | LP03 |
| HSKG HSKH HSKI | Smooth muscle, serum induced, re-exc | pBS | LP03 |
| HFCA HFCB HFCC HFCD HFCE | Human Fetal Brain | Uni-ZAP XR | LP04 |
| HFCF | | | |
| HPTA HPTB HPTD | Human Pituitary | Uni-ZAP XR | LP04 |
| HTHB HTHC HTHD | Human Thymus | Uni-ZAP XR | LP04 |
| HE6B HE6C HE6D HE6E HE6F HE6G | Human Whole Six Week Old Embryo | Uni-ZAP XR | LP04 |
| HE6S | | | |
| HSSA HSSB HSSC HSSD HSSE HSSF | Human Synovial Sarcoma | Uni-ZAP XR | LP04 |
| HSSG HSSH HSSI HSSJ HSSK | | | |
| HE7T | 7 Week Old Early Stage Human, | Uni-ZAP XR | LP04 |
| | subtracted | | |
| HEPA HEPB HEPC | Human Epididymus | Uni-ZAP XR | LP04 |
| HSNA HSNB HSNC HSNM HSNN | Human Synovium | Uni-ZAP XR | LP04 |
| HPFB HPFC HPFD HPFE | Human Prostate Cancer, Stage C | Uni-ZAP XR | LP04 |
| | fraction | | |
| HE2A HE2D HE2E HE2H HE2I HE2M | 12 Week Old Early Stage Human | Uni-ZAP XR | LP04 |
| HE2N HE2O | | | |
| HE2B HE2C HE2F HE2G HE2P HE2Q | 12 Week Old Early Stage Human, II | Uni-ZAP XR | LP04 |
| HPTS HPTT HPTU | Human Pituitary, subtracted | Uni-ZAP XR | LP04 |
| HAUA HAUB HAUC | Amniotic Cells - TNF induced | Uni-ZAP XR | LP04 |
| HAQA HAQB HAQC HAQD | Amniotic Cells - Primary Culture | Uni-ZAP XR | LP04 |
| HWTA HWTB HWTC | wilm's tumor | Uni-ZAP XR | LP04 |
| HBSD | Bone Cancer, re-excision | Uni-ZAP XR | LP04 |
| HSGB | Salivary gland, re-excision | Uni-ZAP XR | LP04 |
| HSJA HSJB HSJC | Smooth muscle-ILb induced | Uni-ZAP XR | LP04 |
| HSXA HSXB HSXC HSXD | Human Substantia Nigra | Uni-ZAP XR | LP04 |
| HSHA HSHB HSHC | Smooth muscle, IL1b induced | Uni-ZAP XR | LP04 |
| HOUA HOUB HOUC HOUD HOUE | Adipocytes | Uni-ZAP XR | LP04 |
| HPWA HPWB HPWC HPWD HPWE | Prostate BPH | Uni-ZAP XR | LP04 |
| HELA HELB HELC HELD HELE | Endothelial cells-control | Uni-ZAP XR | LP04 |
| HELF HELG HELH | | | |
| HEMA HEMB HEMC HEMD HEME | Endothelial-induced | Uni-ZAP XR | LP04 |
| HEMF HEMG HEMH | | | |
| HBIA HBIB HBIC | Human Brain, Striatum | Uni-ZAP XR | LP04 |
| HHSA HHSB HHSC HHSD HHSE | Human Hypothalmus, Schizophrenia | Uni-ZAP XR | LP04 |
| HNGA HNGB HNGC HNGD HNGE | neutrophils control | Uni-ZAP XR | LP04 |
| HNGF HNGG HNGH HNGI HNGJ | | | |
| HNHA HNHB HNHC HNHD HNHE | Neutrophils IL-1 and LPS induced | Uni-ZAP XR | LP04 |
| HNHF HNHG HNHH HNHI HNHJ | | | |
| HSDB HSDC | STRIATUM DEPRESSION | Uni-ZAP XR | LP04 |
| HHPT | Hypothalamus | Uni-ZAP XR | LP04 |
| HSAT HSAU HSAV HSAW HSAX | Anergic T-cell | Uni-ZAP XR | LP04 |
| HSAY HSAZ | | | |
| HBMS HBMT HBMU HBMV HBMW | Bone marrow | Uni-ZAP XR | LP04 |
| HBMX | | | |
| HOEA HOEB HOEC HOED HOEE | Osteoblasts | Uni-ZAP XR | LP04 |
| HOEF HOEJ | | | |
| HAIA HAIB HAIC HAID HAIE HAIF | Epithelial-TNFa and INF induced | Uni-ZAP XR | LP04 |
| HTGA HTGB HTGC HTGD | Apoptotic T-cell | Uni-ZAP XR | LP04 |
| HMCA HMCB HMCC HMCD HMCE | Macrophage-oxLDL | Uni-ZAP XR | LP04 |
| HMAA HMAB HMAC HMAD HMAE | Macrophage (GM-CSF treated) | Uni-ZAP XR | LP04 |
| HMAF HMAG | | | |
| HPHA | Normal Prostate | Uni-ZAP XR | LP04 |
| HPIA HPIB HPIC | LNCAP prostate cell line | Uni-ZAP XR | LP04 |
| HPJA HPJB HPJC | PC3 Prostate cell line | Uni-ZAP XR | LP04 |
| HOSE HOSF HOSG | Human Osteoclastoma, re-excision | Uni-ZAP XR | LP04 |
| HTGE HTGF | Apoptotic T-cell, re-excision | Uni-ZAP XR | LP04 |
| HMAJ HMAK | H Macrophage (GM-CSF treated), re- | Uni-ZAP XR | LP04 |
| | excision | | |
| HACB HACC HACD | Human Adipose Tissue, re-excision | Uni-ZAP XR | LP04 |
| HFPA | H. Frontal Cortex, Epileptic | Uni-ZAP XR | LP04 |
| HFAA HFAB HFAC HFAD HFAE | Alzheimer's, spongy change | Uni-ZAP XR | LP04 |
| HFAM | Frontal Lobe, Dementia | Uni-ZAP XR | LP04 |
| HMIA HMIB HMIC | Human Manic Depression Tissue | Uni-ZAP XR | LP04 |
| HTSA HTSE HTSF HTSG HTSH | Human Thymus | pBS | LP05 |
| HPBA HPBB HPBC HPBD HPBE | Human Pineal Gland | pBS | LP05 |
| HSAA HSAB HSAC | HSA 172 Cells | pBS | LP05 |
| HSBA HSBB HSBC HSBM | HSC172 cells | pBS | LP05 |
| HJAA HJAB HJAC HJAD | Jurkat T-cell G1 phase | pBS | LP05 |
| HJBA HJBB HJBC HJBD | Jurkat T-Cell, S phase | pBS | LP05 |
| HAFA HAFB | Aorta endothelial cells + TNF-a | pBS | LP05 |
| HAWA HAWB HAWC | Human White Adipose | pBS | LP05 |
| HTNA HTNB | Human Thyroid | pBS | LP05 |
| HONA | Normal Ovary, Premenopausal | pBS | LP05 |
| HARA HARB | Human Adult Retina | pBS | LP05 |
| HLJA HLJB | Human Lung | pCMVSport 1 | LP06 |
| HOFM HOFN HOFO | H. Ovarian Tumor, II, OV5232 | pCMVSport 2.0 | LP07 |
| HOGA HOGB HOGC | OV 10-3-95 | pCMVSport 2.0 | LP07 |
| HCGL | CD34+ cells, II | pCMVSport 2.0 | LP07 |
| HDLA | Hodgkin's Lymphoma I | pCMVSport 2.0 | LP07 |
| HDTA HDTB HDTC HDTD HDTE | Hodgkin's Lymphoma II | pCMVSport 2.0 | LP07 |
| HKAA HKAB HKAC HKAD HKAE | Keratinocyte | pCMVSport 2.0 | LP07 |
| HKAF HKAG HKAH | | | |
| HCIM | CAPFINDER, Crohn's Disease, lib 2 | pCMVSport 2.0 | LP07 |
| HKAL | Keratinocyte, lib 2 | pCMVSport 2.0 | LP07 |
| HKAT | Keratinocyte, lib 3 | pCMVSport 2.0 | LP07 |
| HNDA | Nasal polyps | pCMVSport 2.0 | LP07 |
| HDRA | H. Primary Dendritic Cells, lib 3 | pCMVSport 2.0 | LP07 |
| HOHA HOHB HOHC | Human Osteoblasts II | pCMVSport 2.0 | LP07 |
| HLDA HLDB HLDC | Liver, Hepatoma | pCMVSport 3.0 | LP08 |
| HLDN HLDO HLDP | Human Liver, normal | pCMVSport 3.0 | LP08 |
| HMTA | pBMC stimulated w/poly I/C | pCMVSport 3.0 | LP08 |
| HNTA | NTERA2, control | pCMVSport 3.0 | LP08 |
| HDPA HDPB HDPC HDPD HDPF | Primary Dendritic Cells, lib 1 | pCMVSport 3.0 | LP08 |
| HDPG HDPH HDPI HDPJ HDPK | | | |
| HDPM HDPN HDPO HDPP | Primary Dendritic cells, frac 2 | pCMVSport 3.0 | LP08 |
| HMUA HMUB HMUC | Myoloid Progenitor Cell Line | pCMVSport 3.0 | LP08 |
| HHEA HHEB HHEC HHED | T Cell helper I | pCMVSport 3.0 | LP08 |
| HHEM HHEN HHEO HHEP | T cell helper II | pCMVSport 3.0 | LP08 |
| HEQA HEQB HEQC | Human endometrial stromal cells | pCMVSport 3.0 | LP08 |
| HJMA HJMB | Human endometrial stromal cells- | pCMVSport 3.0 | LP08 |
| | treated with progesterone | | |
| HSWA HSWB HSWC | Human endometrial stromal cells- | pCMVSport 3.0 | LP08 |
| | treated with estradiol | | |
| HSYA HSYB HSYC | Human Thymus Stromal Cells | pCMVSport 3.0 | LP08 |
| HLWA HLWB HLWC | Human Placenta | pCMVSport 3.0 | LP08 |
| HRAA HRAB HRAC | Rejected Kidney, lib 4 | pCMVSport 3.0 | LP08 |
| HMTM | PCR, pBMC I/C treated | PCRII | LP09 |
| HMJA | H. Meniingima, M6 | pSport 1 | LP10 |
| HMKA HMKB HMKC HMKD HMKE | H. Meningima, M1 | pSport 1 | LP10 |
| HUSG HUSI | Human umbilical vein endothelial cells, | pSport 1 | LP10 |
| | IL-4 induced | | |
| HUSX HUSY | Human Umbilical Vein Endothelial | pSport 1 | LP10 |
| | Cells, uninduced | | |
| HOFA | Ovarian Tumor I, OV5232 | pSport 1 | LP10 |
| HCFA HCFB HCFC HCFD | T-Cell PHA 16 hrs | pSport 1 | LP10 |
| HCFL HCFM HCFN HCFO | T-Cell PHA 24 hrs | pSport 1 | LP10 |
| HADA HADC HADD HADE HADF | Human Adipose | pSport 1 | LP10 |
| HADG | | | |
| HOVA HOVB HOVC | Human Ovary | pSport 1 | LP10 |
| HTWB HTWC HTWD HTWE HTWF | Resting T-Cell Library, II | pSport 1 | LP10 |
| HMMA | Spleen metastic melanoma | pSport 1 | LP10 |
| HLYA HLYB HLYC HLYD HLYE | Spleen, Chronic lymphocytic leukemia | pSport 1 | LP10 |
| HCGA | CD34+ cell, I | pSport 1 | LP10 |
| HEOM HEON | Human Eosinophils | pSport 1 | LP10 |
| HTDA | Human Tonsil, Lib 3 | pSport 1 | LP10 |
| HSPA | Salivary Gland, Lib 2 | pSport 1 | LP10 |
| HCHA HCHB HCHC | Breast Cancer cell line, MDA 36 | pSport 1 | LP10 |
| HCHM HCHN | Breast Cancer Cell line, angiogenic | pSport 1 | LP10 |
| HCIA | Crohn's Disease | pSport 1 | LP10 |
| HDAA HDAB HDAC | HEL cell line | pSport 1 | LP10 |
| HABA | Human Astrocyte | pSport 1 | LP10 |
| HUFA HUFB HUFC | Ulcerative Colitis | pSport 1 | LP10 |
| HNTM | NTERA2 + retinoic acid, 14 days | pSport 1 | LP10 |
| HDQA | Primary Dendritic cells, CapFinder2, | pSport 1 | LP10 |
| | frac 1 | | |
| HDQM | Primary Dendritic Cells, CapFinder, | pSport 1 | LP10 |
| | frac 2 | | |
| HLDX | Human Liver, normal, CapFinder | pSport 1 | LP10 |
| HULA HULB HULC | Human Dermal Endothelial | pSport 1 | LP10 |
| | Cells, untreated | | |
| HUMA | Human Dermal Endothelial cells, treated | pSport 1 | LP10 |
| HCJA | Human Stromal Endometrial | pSport 1 | LP10 |
| | fibroblasts, untreated | | |
| HCJM | Human Stromal endometrial fibroblasts, | pSport 1 | LP10 |
| | treated w/estradiol | | |
| HEDA | Human Stromal endometrial fibroblasts, | pSport 1 | LP10 |
| | treated with progesterone | | |
| HFNA | Human ovary tumor cell OV350721 | pSport 1 | LP10 |
| HKGA HKGB HKGC HKGD | Merkel Cells | pSport 1 | LP10 |
| HISA HISB HISC | Pancreas Islet Cell Tumor | pSport 1 | LP10 |
| HLSA | Skin, burned | pSport 1 | LP10 |
| HBZA | Prostate, BPH, Lib 2 | pSport 1 | LP10 |
| HBZS | Prostate BPH, Lib 2, subtracted | pSport 1 | LP10 |
| HFIA HFIB HFIC | Synovial Fibroblasts (control) | pSport 1 | LP10 |
| HFIH HFII HFIJ | Synovial hypoxia | pSport 1 | LP10 |
| HFIT HFIU HFIV | Synovial IL-1/TNF stimulated | pSport 1 | LP10 |
| HGCA | Messangial cell, frac 1 | pSport 1 | LP10 |
| HMVA HMVB HMVC | Bone Marrow Stromal Cell, untreated | pSport 1 | LP10 |
| HFIX HFIY HFIZ | Synovial Fibroblasts (III/TNF), subt | pSport 1 | LP10 |
| HFOX HFOY HFOZ | Synovial hypoxia-RSF subtracted | pSport 1 | LP10 |
| HMQA HMQB HMQC HMQD | Human Activated Monocytes | Uni-ZAP XR | LP11 |
| HLIA HLIB HLIC | Human Liver | pCMVSport 1 | LP012 |
| HHBA HHBB HHBC HHBD HHBE | Human Heart | pCMVSport 1 | LP012 |
| HBBA HBBB | Human Brain | pCMVSport 1 | LP012 |
| HLJA HLJB HUJC HLJD HLJE | Human Lung | pCMVSport 1 | LP012 |
| HOGA HOGB HOGC | Ovarian Tumor | pCMVSport 2.0 | LP012 |
| HTJM | Human Tonsils, Lib 2 | pCMVSport 2.0 | LP012 |
| HAMF HAMG | KMH2 | pCMVSport 3.0 | LP012 |
| HAJA HAJB HAJC | L428 | pCMVSport 3.0 | LP012 |
| HWBA HWBB HWBC HWBD HWBE | Dendritic cells, pooled | pCMVSport 3.0 | LP012 |
| HWAA HWAB HWAC HWAD HWAE | Human Bone Marrow, treated | pCMVSport 3.0 | LP012 |
| HYAA HYAB HYAC | B Cell lymphoma | pCMVSport 3.0 | LP012 |
| HWHG HWHH HWHI | Healing groin wound, 6.5 hours post | pCMVSport 3.0 | LP012 |
| | incision | | |
| HWHP HWHQ HWHR | Healing groin wound; 7.5 hours post | pCMVSport 3.0 | LP012 |
| | incision | | |
| HARM | Healing groin wound - zero hr post- | pCMVSport 3.0 | LP012 |
| | incision (control) | | |
| HBIM | Olfactory epithelium; nasalcavity | pCMVSport 3.0 | LP012 |
| HWDA | Healing Abdomen wound; 70&90 min | pCMVSport 3.0 | LP012 |
| | post incision | | |
| HWEA | Healing Abdomen Wound; 15 days post | pCMVSport 3.0 | LP012 |
| | incision | | |
| HWJA | Healing Abdomen Wound; 21&29 days | pCMVSport 3.0 | LP012 |
| HNAL | Human Tongue, frac 2 | pSport 1 | LP012 |
| HMJA | H. Meniingima, M6 | pSport 1 | LP012 |
| HMKA HMKB HMKC HMKD HMKE | H. Meningima, M1 | pSport 1 | LP012 |
| HOFA | Ovarian Tumor I, OV5232 | pSport 1 | LP012 |
| HCFA HCFB HCFC HCFD | T-Cell PHA 16 hrs | pSport 1 | LP012 |
| HCFL HCFM HCFN HCFO | T-Cell PHA 24 hrs | pSport 1 | LP012 |
| HMMA HMMB HMMC | Spleen metastic melanoma | pSport 1 | LP012 |
| HTDA | Human Tonsil, Lib 3 | pSport 1 | LP012 |
| HDBA | Human Fetal Thymus | pSport 1 | LP012 |
| HDUA | Pericardium | pSport 1 | LP012 |
| HBZA | Prostate, BPH, Lib 2 | pSport 1 | LP012 |
| HWCA | Larynx tumor | pSport 1 | LP012 |
| HWKA | Normal lung | pSport 1 | LP012 |
| HSMB | Bone marrow stroma, treated | pSport 1 | LP012 |
| HBHM | Normal trachea | pSport 1 | LP012 |
| HLFC | Human Larynx | pSport 1 | LP012 |
| HLRB | Siebben Polyposis | pSport 1 | LP012 |
| HNIA | Mammary Gland | pSport 1 | LP012 |
| HNJB | Palate carcinoma | pSport 1 | LP012 |
| HNKA | Palate normal | pSport 1 | LP012 |
| HMZA | Pharynx carcinoma | pSport 1 | LP012 |
| HABG | Cheek Carcinoma | pSport 1 | LP012 |
| HMZM | Pharynx Carcinoma | pSport 1 | LP012 |
| HDRM | Larynx Carcinoma | pSport 1 | LP012 |
| HVAA | Pancreas normal PCA4 No | pSport 1 | LP012 |
| HICA | Tongue carcinoma | pSport 1 | LP012 |
| HUKA HUKB HUKC HUKD HUKE | Human Uterine Cancer | Lambda ZAP II | LP013 |
| HFFA | Human Fetal Brain, random primed | Lambda ZAP II | LP013 |
| HTUA | Activated T-cell labeled with 4-thioluri | Lambda ZAP II | LP013 |
| HBQA | Early Stage Human Brain, random | Lambda ZAP II | LP013 |
| | primed | | |
| HMEB | Human microvascular Endothelial cells, | Lambda ZAP II | LP013 |
| | fract. B | | |
| HUSH | Human Umbilical Vein Endothelial | Lambda ZAP II | LP013 |
| | cells, fract. A, re-excision | | |
| HLQC HLQD | Hepatocellular tumor, re-excision | Lambda ZAP II | LP013 |
| HTWJ HTWK HTWL | Resting T-cell, re-excision | Lambda ZAP II | LP013 |
| HF6S | Human Whole 6 week Old Embryo (II), | pBluescript | LP013 |
| | subt | | |
| HHPS | Human Hippocampus, subtracted | pBluescript | LP013 |
| HL1S | LNCAP, differential expression | pBluescript | LP013 |
| HLHS HLHT | Early Stage Human Lung, Subtracted | pBluescript | LP013 |
| HSUS | Supt cells, cyclohexamide treated, | pBluescript | LP013 |
| | subtracted | | |
| HSUT | Supt cells, cyclohexamide treated, | pBluescript | LP013 |
| | differentially expressed | | |
| HSDS | H. Striatum Depression, subtracted | pBluescript | LP013 |
| HPTZ | Human Pituitary, Subtracted VII | pBluescript | LP013 |
| HSDX | H. Striatum Depression, subt II | pBluescript | LP013 |
| HSDZ | H. Striatum Depression, subt | pBluescript | LP013 |
| HPBA HPBB HPBC HPBD HPBE | Human Pineal Gland | pBluescript SK- | LP013 |
| HRTA | Colorectal Tumor | pBluescript SK- | LP013 |
| HSBA HSBB HSBC HSBM | HSC172 cells | pBluescript SK- | LP013 |
| HJAA HJAB HJAC HJAD | Jurkat T-cell G1 phase | pBluescript SK- | LP013 |
| HJBA HJBB HJBC HJBD | Jurkat T-cell, S1 phase | pBluescript SK- | LP013 |
| HTNA HTNB | Human Thyroid | pBluescript SK- | LP013 |
| HAHA HAHB | Human Adult Heart | Uni-ZAP XR | LP013 |
| HE6A | Whole 6 week Old Embryo | Uni-ZAP XR | LP013 |
| HFCA HFCB HFCC HFCD HFCE | Human Fetal Brain | Uni-ZAP XR | LP013 |
| HFKC HFKD HFKE HFKF HFKG | Human Fetal Kidney | Uni-ZAP XR | LP013 |
| HGBA HGBD HGBE HGBF HGBG | Human Gall Bladder | Uni-ZAP XR | LP013 |
| HPRA HPRB HPRC HPRD | Human Prostate | Uni-ZAP XR | LP013 |
| HTEA HTEB HTEC HTED HTEE | Human Testes | Uni-ZAP XR | LP013 |
| HTTA HTTB HTTC HTTD HTTE | Human Testes Tumor | Uni-ZAP XR | LP013 |
| HYBA HYBB | Human Fetal Bone | Uni-ZAP XR | LP013 |
| HFLA | Human Fetal Liver | Uni-ZAP XR | LP013 |
| HHFB HHFC HHFD HHFE HHFF | Human Fetal Heart | Uni-ZAP XR | LP013 |
| HUVB HUVC HUVD HUVE | Human Umbilical Vein, End. remake | Uni-ZAP XR | LP013 |
| HTHB HTHC HTHD | Human Thymus | Uni-ZAP XR | LP013 |
| HSTA HSTB HSTC HSTD | Human Skin Tumor | Uni-ZAP XR | LP013 |
| HTAA HTAB HTAC HTAD HTAE | Human Activated T-cells | Uni-ZAP XR | LP013 |
| HFEA HFEB HFEC | Human Fetal Epithelium (skin) | Uni-ZAP XR | LP013 |
| HJPA HJPB HJPC HJPD | Human Jurkat Membrane Bound | Uni-ZAP XR | LP013 |
| | Polysomes | | |
| HESA | Human Epithelioid Sarcoma | Uni-ZAP XR | LP013 |
| HALS | Human Adult Liver, Subtracted | Uni-ZAP XR | LP013 |
| HFTA HFTB HFTC HFTD | Human Fetal Dura Mater | Uni-ZAP XR | LP013 |
| HCAA HCAB HCAC | Cem cells, cyclohexamide treated | Uni-ZAP XR | LP013 |
| HRGA HRGB HRGC HRGD | Raji Cells, cyclohexamide treated | Uni-ZAP XR | LP013 |
| HE9A HE9B HE9C HE9D HE9E | Nine Week Old Early Stage Human | Uni-ZAP XR | LP013 |
| HSFA | Human Fibrosarcoma | Uni-ZAP XR | LP013 |
| HATA HATB HATC HATD HATE | Human Adrenal Gland Tumor | Uni-ZAP XR | LP013 |
| HTRA | Human Trachea Tumor | Uni-ZAP XR | LP013 |
| HE2A HE2D HE2E HE2H HE2I | 12 Week Old Early Stage Human | Uni-ZAP XR | LP013 |
| HE2B HE2C HE2F HE2G HE2P | 12 Week Old Early Stage Human, II | Uni-ZAP XR | LP013 |
| HNEA HNEB HNEC HNED HNEE | Human Neutrophil | Uni-ZAP XR | LP013 |
| HBGA | Human Primary Breast Cancer | Uni-ZAP XR | LP013 |
| HPTS HPTT HPTU | Human Pituitary, subtracted | Uni-ZAP XR | LP013 |
| HMQA HMQB HMQC HMQD | Human Activated Monocytes | Uni-ZAP XR | LP013 |
| HOAA HOAB HOAC | Human Osteosarcoma | Uni-ZAP XR | LP013 |
| HTOA HTOD HTOE HTOF HTOG | human tonsils | Uni-ZAP XR | LP013 |
| HMGB | Human OB MG63 control fraction I | Uni-ZAP XR | LP013 |
| HOPB | Human OB HOS control fraction I | Uni-ZAP XR | LP013 |
| HOQB | Human OB HOS treated (1 nM E2) | Uni-ZAP XR | LP013 |
| | fraction I | | |
| HAUA HAUB HAUC | Amniotic Cells - TNF induced | Uni-ZAP XR | LP013 |
| HAQA HAQB HAQC HAQD | Amniotic Cells - Primary Culture | Uni-ZAP XR | LP013 |
| HROA HROC | HUMAN STOMACH | Uni-ZAP XR | LP013 |
| HBJA HBJB HBJC HBJD HBJE | HUMAN B CELL LYMPHOMA | Uni-ZAP XR | LP013 |
| HODA HODB HODC HODD | human ovarian cancer | Uni-ZAP XR | LP013 |
| HCPA | Corpus Callosum | Uni-ZAP XR | LP013 |
| HSOA | stomach cancer (human) | Uni-ZAP XR | LP013 |
| HERA | SKIN | Uni-ZAP XR | LP013 |
| HMDA | Brain-medulloblastoma | Uni-ZAP XR | LP013 |
| HGLA HGLB HGLD | Glioblastoma | Uni-ZAP XR | LP013 |
| HWTA HWTB HWTC | wilm's tumor | Uni-ZAP XR | LP013 |
| HEAA | H. Atrophic Endometrium | Uni-ZAP XR | LP013 |
| HAPN HAPO HAPP HAPQ HAPR | Human Adult Pulmonary; re-excision | Uni-ZAP XR | LP013 |
| HLTG HLTH | Human T-cell lymphoma; re-excision | Uni-ZAP XR | LP013 |
| HAHC HAHD HAHE | Human Adult Heart; re-excision | Uni-ZAP XR | LP013 |
| HAGA HAGB HAGC HAGD HAGE | Human Amygdala | Uni-ZAP XR | LP013 |
| HSJA HSJB HSJC | Smooth muscle-ILb induced | Uni-ZAP XR | LP013 |
| HSHA HSHB HSHC | Smooth muscle, IL1b induced | Uni-ZAP XR | LP013 |
| HPWA HPWB HPWC HPWD HPWE | Prostate BPH | Uni-ZAP XR | LP013 |
| HPIA HPIB HPIC | LNCAP prostate cell line | Uni-ZAP XR | LP013 |
| HPJA HPJB HPJC | PC3 Prostate cell line | Uni-ZAP XR | LP013 |
| HBTA | Bone Marrow Stroma, TNF&LPS ind | Uni-ZAP XR | LP013 |
| HMCF HMCG HMCH HMCI HMCJ | Macrophage-oxLDL; re-excision | Uni-ZAP XR | LP013 |
| HAGG HAGH HAGI | Human Amygdala; re-excision | Uni-ZAP XR | LP013 |
| HACA | H. Adipose Tissue | Uni-ZAP XR | LP013 |
| HKFB | K562 + PMA (36 hrs), re-excision | ZAP Express | LP013 |
| HCWT HCWU HCWV | CD34 positive cells (cord blood), re-ex | ZAP Express | LP013 |
| HBWA | Whole brain | ZAP Express | LP013 |
| HBXA HBXB HBXC HBXD | Human Whole Brain #2 - Oligo dT > | ZAP Express | LP013 |
| | 1.5 Kb | | |
| HAVM | Temporal cortex-Alzheizmer | pT-Adv | LP014 |
| HAVT | Hippocampus, Alzheimer Subtracted | pT-Adv | LP014 |
| HHAS | CHME Cell Line | Uni-ZAP XR | LP014 |
| HAJR | Larynx normal | pSport 1 | LP014 |
| HWLE HWLF HWLG HWLH | Colon Normal | pSport 1 | LP014 |
| HCRM HCRN HCRO | Colon Carcinoma | pSport 1 | LP014 |
| HWLI HWLJ HWLK | Colon Normal | pSport 1 | LP014 |
| HWLQ HWLR HWLS HWLT | Colon Tumor | pSport I | LP014 |
| HBFM | Gastrocnemius Muscle | pSport 1 | LP014 |
| HBOD HBOE | Quadriceps Muscle | pSport 1 | LP014 |
| HBKD HBKE | Soleus Muscle | pSport 1 | LP014 |
| HCCM | Pancreatic Langerhans | pSport 1 | LP014 |
| HWGA | Larynx carcinoma | pSport 1 | LP014 |
| HWGM HWGN | Larynx carcinoma | pSport 1 | LP014 |
| HWLA HWLB HWLC | Normal colon | pSport 1 | LP014 |
| HWLM HWLN | Colon Tumor | pSport 1 | LP014 |
| HVAM HVAN HVAO | Pancreas Tumor | pSport 1 | LP014 |
| HWGQ | Larynx carcinoma | pSport 1 | LP014 |
| HAQM HAQN | Salivary Gland | pSport 1 | LP014 |
| HASM | Stomach; normal | pSport 1 | LP014 |
| HBCM | Uterus; normal | pSport 1 | LP014 |
| HCDM | Testis; normal | pSport 1 | LP014 |
| HDJM | Brain; normal | pSport 1 | LP014 |
| HEFM | Adrenal Gland, normal | pSport 1 | LP014 |
| HBAA | Rectum normal | pSport 1 | LP014 |
| HFDM | Rectum tumour | pSport 1 | LP014 |
| HGAM | Colon, normal | pSport 1 | LP014 |
| HHMM | Colon, tumour | pSport 1 | LP014 |
| HCLB HCLC | Human Lung Cancer | Lambda Zap II | LP015 |
| HRLA | L1 Cell line | ZAP Express | LP015 |
| HHAM | Hypothalamus, Alzheimer's | pCMVSport 3.0 | LP015 |
| HKBA | Ku 812F Basophils Line | pSport 1 | LP015 |
| HS2S | Saos2, Dexamethosome Treated | pSport 1 | LP016 |
| HA5A | Lung Carcinoma A549 TNFalpha | pSport 1 | LP016 |
| | activated | | |
| HTFM | TF-1 Cell Line GM-CSF Treated | pSport 1 | LP016 |
| HYAS | Thyroid Tumour | pSport 1 | LP016 |
| HUTS | Larynx Normal | pSport 1 | LP016 |
| HXOA | Larynx Tumor | pSport 1 | LP016 |
| HEAH | Ea.hy.926 cell line | pSport 1 | LP016 |
| HINA | Adenocarcinoma Human | pSport 1 | LP016 |
| HRMA | Lung Mesothelium | pSport 1 | LP016 |
| HLCL | Human Pre-Differentiated Adipocytes | Uni-Zap XR | LP017 |
| HS2A | Saos2 Cells | pSport 1 | LP020 |
| HS2I | Saos2 Cells; Vitamin D3 Treated | pSport 1 | LP020 |
| HUCM | CHME Cell Line, untreated | pSport 1 | LP020 |
| HEPN | Aryepiglottis Normal | pSport 1 | LP020 |
| HPSN | Sinus Piniformis Tumour | pSport 1 | LP020 |
| HNSA | Stomach Normal | pSport 1 | LP020 |
| HNSM | Stomach Tumour | pSport 1 | LP020 |
| HNLA | Liver Normal Met5No | pSport 1 | LP020 |
| HUTA | Liver Tumour Met 5 Tu | pSport 1 | LP020 |
| HOCN | Colon Normal | pSport 1 | LP020 |
| HOCT | Colon Tumor | pSport 1 | LP020 |
| HTNT | Tongue Tumour | pSport 1 | LP020 |
| HLXN | Larynx Normal | pSport 1 | LP020 |
| HLXT | Larynx Tumour | pSport 1 | LP020 |
| HTYN | Thymus | pSport 1 | LP020 |
| HPLN | Placenta | pSport 1 | LP020 |
| HTNG | Tongue Normal | pSport 1 | LP020 |
| HZAA | Thyroid Normal (SDCA2 No) | pSport 1 | LP020 |
| HWES | Thyroid Thyroiditis | pSport 1 | LP020 |
| HFHD | Ficolled Human Stromal Cells, 5Fu | pTrip1Ex2 | LP021 |
| | treated | | |
| HFHM, HFHN | Ficolled Human Stromal Cells, | pTrip1Ex2 | LP021 |
| | Untreated | | |
| HPCI | Hep G2 Cells, lambda library | lambda Zap-CMV XR | LP021 |
| HBCA, HBCB, HBCC | H. Lymph node breast Cancer | Uni-ZAP XR | LP021 |
| HCOK | Chondrocytes | pSPORT1 | LP022 |
| HDCA, HDCB, HDCC | Dendritic Cells From CD34 Cells | pSPORT 1 | LP022 |
| HDMA, HDMB | CD40 activated monocyte dendritic | pSPORT 1 | LP022 |
| | cells | | |
| HDDM, HDDN, HDDO | LPS activated derived dendritic cells | pSPORT 1 | LP022 |
| HPCR | Hep G2 Cells, PCR library | lambda Zap-CMV XR | LP022 |
| HAAA, HAAB, HAAC | Lung, Cancer (4005313A3): Invasive | pSPORT 1 | LP022 |
| | Poorly Differentiated Lung | | |
| | Adenocarcinoma | | |
| HIPA, HIPB, HIPC | Lung, Cancer (4005163 B7): Invasive, | pSPORT 1 | LP022 |
| | Poorly Diff. Adenocarcinoma, | | |
| | Metastatic | | |
| HOOH, HOOI | Ovary, Cancer: (4004562 B6) Papillary | pSPORT 1 | LP022 |
| | Serous Cystic Neoplasm, Low | | |
| | Malignant Pot | | |
| HIDA | Lung, Normal: (4005313 B1) | pSPORT 1 | LP022 |
| HUJA, HUJB, HUJC, HUJD, HUJE | B-Cells | pCMVSport 3.0 | LP022 |
| HNOA, HNOB, HNOC, HNOD | Ovary, Normal: (9805C040R) | pSPORT 1 | LP022 |
| HNLM | Lung, Normal: (4005313 B1) | pSPORT 1 | LP022 |
| HSCL | Stromal Cells | pSPORT 1 | LP022 |
| HAAX | Lung, Cancer: (4005313 A3) Invasive | pSPORT 1 | LP022 |
| | Poorly-differentiated Metastatic lung | | |
| | adenocarcinoma | | |
| HUUA, HUUB, HUUC, HUUD | B-cells (unstimulated) | pTrip1Ex2 | LP022 |
| HWWA, HWWB, HWWC, HWWD, HW | B-cells (stimulated) | pSPORT 1 | LP022 |
| WE, HWWF, HWWG | | | |
| HCCC | Colon, Cancer: (9808C064R) | pCMVSport 3.0 | LP023 |
| HPDO HPDP HPDQ HPDR HPD | Ovary, Cancer (9809C332): Poorly | pSport 1 | LP023 |
| | differentiated adenocarcinoma | | |
| HPCO HPCP HPCQ HPCT | Ovary, Cancer (15395A1F): Grade II | pSport 1 | LP023 |
| | Papillary Carcinoma | | |
| HOCM HOCO HOCP HOCQ | Ovary, Cancer: (15799A1F) Poorly | pSport 1 | LP023 |
| | differentiated carcinoma | | |
| HCBM HCBN HCBO | Breast, Cancer: (4004943 A5) | pSport 1 | LP023 |
| HNBT HNBU HNBV | Breast, Normal: (4005522B2) | pSport 1 | LP023 |
| HBCP HBCQ | Breast, Cancer: (4005522 A2) | pSport 1 | LP023 |
| HBCJ | Breast, Cancer: (9806C012R) | pSport 1 | LP023 |
| HSAM HSAN | Stromal cells 3.88 | pSport 1 | LP023 |
| HVCA HVCB HVCC HVCD | Ovary, Cancer: (4004332 A2) | pSport 1 | LP023 |
| HSCK HSEN HSEO | Stromal cells (HBM3.18) | pSport 1 | LP023 |
| HSCP HSCQ | stromal cell clone 2.5 | pSport 1 | LP023 |
| HUXA | Breast Cancer: (4005385 A2) | pSport 1 | LP023 |
| HCOM HCON HCOO HCOP HCOQ | Ovary, Cancer (4004650 A3): Well- | pSport 1 | LP023 |
| | Differentiated Micropapillary Serous | | |
| | Carcinoma | | |
| HBNM | Breast, Cancer: (9802C020E) | pSport 1 | LP023 |
| HVVA HVVB HVVC HVVD HVVE | Human Bone Marrow, treated | pSport 1 | LP023 |

[0936] Two nonlimiting examples are provided below for isolating a particular clone from the deposited sample of plasmid cDNAs cited for that clone in Table 7. First, a plasmid is directly isolated by screening the clones using a polynucleotide probe corresponding to the nucleotide sequence of SEQ ID NO: X.

[0937] Particularly, a specific polynucleotide with 30-40 nucleotides is synthesized using an Applied Biosystems DNA synthesizer according to the sequence reported. The oligonucleotide is labeled, for instance, with ³²P-γ-ATP using T4 polynucleotide kinase and purified according to routine methods. (E.g., Maniatis et al., Molecular Cloning: A Laboratory Manual, Cold Spring Harbor Press, Cold Spring, N.Y. (1982).) The plasmid mixture is transformed into a suitable host, as indicated above (such as XL-1 Blue (Stratagene)) using techniques known to those of skill in the art, such as those provided by the vector supplier or in related publications or patents cited above. The transformants are plated on 1.5% agar plates (containing the appropriate selection agent, e.g., ampicillin) to a density of about 150 transformants (colonies) per plate. These plates are screened using Nylon membranes according to routine methods for bacterial colony screening (e.g., Sambrook et al., Molecular Cloning: A Laboratory Manual, 2nd Edit., (1989), Cold Spring Harbor Laboratory Press, pages 1.93 to 1.104), or other techniques known to those of skill in the art.

[0938] Alternatively, two primers of 17-20 nucleotides derived from both ends of the nucleotide sequence of SEQ ID NO: X are synthesized and used to amplify the desired cDNA using the deposited cDNA plasmid as a template. The polymerase chain reaction is carried out under routine conditions, for instance, in 25 μl of reaction mixture with 0.5 ug of the above cDNA template. A convenient reaction mixture is 1.5-5 mM MgCl₂, 0.01% (w/v) gelatin, 20 μM each of dATP, dCTP, dGTP, dTTP, 25 pmol of each primer and 0.25 Unit of Taq polymerase. Thirty five cycles of PCR (denaturation at 94° C. for 1 min; annealing at 55° C for I min; elongation at 72° C. for 1 min) are performed with a Perkin-Elmer Cetus automated thermal cycler. The amplified product is analyzed by agarose gel electrophoresis and the DNA band with expected molecular weight is excised and purified. The PCR product is verified to be the selected sequence by subcloning and sequencing the DNA product.

[0939] Several methods are available for the identification of the 5′ or 3′ non-coding portions of a gene which may not be present in the deposited clone. These methods include but are not limited to, filter probing, clone enrichment using specific probes, and protocols similar or identical to 5′ and 3′ “RACE” protocols which are well known in the art. For instance, a method similar to 5′ RACE is available for generating the missing 5′ end of a desired full-length transcript. (Fromont-Racine et al., Nucleic Acids Res. 21(7):1683-1684 (1993).)

[0940] Briefly, a specific RNA oligonucleotide is ligated to the 5′ ends of a population of RNA presumably containing full-length gene RNA transcripts. A primer set containing a primer specific to the ligated RNA oligonucleotide and a primer specific to a known sequence of the gene of interest is used to PCR amplify the 5′ portion of the desired full-length gene. This amplified product may then be sequenced and used to generate the full length gene.

[0941] This above method starts with total RNA isolated from the desired source, although poly-A+ RNA can be used. The RNA preparation can then be treated with phosphatase if necessary to eliminate 5′ phosphate groups on degraded or damaged RNA which may interfere with the later RNA ligase step. The phosphatase should then be inactivated and the RNA treated with tobacco acid pyrophosphatase in order to remove the cap structure present at the 5′ ends of messenger RNAs. This reaction leaves a 5′ phosphate group at the 5′ end of the cap cleaved RNA which can then be ligated to an RNA oligonucleotide using T4 RNA ligase.

[0942] This modified RNA preparation is used as a template for first strand cDNA synthesis using a gene specific oligonucleotide. The first strand synthesis reaction is used as a template for PCR amplification of the desired 5′ end using a primer specific to the ligated RNA oligonucleotide and a primer specific to the known sequence of the gene of interest. The resultant product is then sequenced and analyzed to confirm that the 5′ end sequence belongs to the desired gene.

### Example 2

### Isolation of Genomic Clones Corresponding to a Polynucleotide

[0943] A human genomic P1 library (Genomic Systems, Inc.) is screened by PCR using primers selected for the sequence corresponding to SEQ ID NO: X according to the method described in Example 1. (See also, Sambrook et al., Molecular Cloning: A Laboratory Manual, 2nd Edn., (1989), Cold Spring Harbor Laboratory Press).

### Example 3

### Tissue Specific Expression Analysis

[0944] The Human Genome Sciences, Inc. (HGS) database is derived from sequencing tissue and/or disease specific cDNA libraries. Libraries generated from a particular tissue are selected and the specific tissue expression pattern of EST groups or assembled contigs within these libraries is determined by comparison of the expression patterns of those groups or contigs within the entire database. ESTs and assembled contigs which show tissue specific expression are selected.

[0945] The original clone from which the specific EST sequence was generated, or in the case of an assembled contig, the clone from which the 5′ most EST sequence was generated, is obtained from the catalogued library of clones and the insert amplified by PCR using methods known in the art. The PCR product is denatured and then transferred in 96 or 384 well format to a nylon membrane (Schleicher and Scheull) generating an array filter of tissue specific clones. Housekeeping genes, maize genes, and known tissue specific genes are included on the filters. These targets can be used in signal normalization and to validate assay sensitivity. Additional targets are included to monitor probe length and specificity of hybridization.

[0946] Radioactively labeled hybridization probes are generated by first strand cDNA synthesis per the manufacturer's instructions (Life Technologies) from mRNA/RNA samples prepared from the specific tissue being analyzed (e.g., kidney, kidney cancer, bladder, bladder cancer, ureter, ureter cancer, urethra, urthra cancer, prostate, prostate cancer, ovarian, ovarian cancer, etc.). The hybridization probes are purified by gel exclusion chromatography, quantitated, and hybridized with the array filters in hybridization bottles at 65° C. overnight. The filters are washed under stringent conditions and signals are captured using a Fuji phosphorimager.

[0947] Data is extracted using AIS software and following background subtraction, signal normalization is performed. This includes a normalization of filter-wide expression levels between different experimental runs. Genes that are differentially expressed in the tissue of interest are identified.

### Example 4

### Chromosomal Mapping of the Polynucleotides

[0948] An oligonucleotide primer set is designed according to the sequence at the 5′ end of SEQ ID NO: X. This primer preferably spans about 100 nucleotides. This primer set is then used in a polymerase chain reaction under the following set of conditions: 30 seconds, 95° C.; 1 minute, 56° C.; 1 minute, 70° C. This cycle is repeated 32 times followed by one 5 minute cycle at 70° C. Human, mouse, and hamster DNA is used as template in addition to a somatic cell hybrid panel containing individual chromosomes or chromosome fragments (Bios, Inc). The reactions are analyzed on either 8% polyacrylamide gels or 3.5% agarose gels. Chromosome mapping is determined by the presence of an approximately 100 bp PCR fragment in the particular somatic cell hybrid.

### Example 5

### Bacterial Expression of a Polypeptide

[0949] A polynucleotide encoding a polypeptide of the present invention is amplified using PCR oligonucleotide primers corresponding to the 5′ and 3′ ends of the DNA sequence, as outlined in Example 1, to synthesize insertion fragments. The primers used to amplify the cDNA insert should preferably contain restriction sites, such as BamHI and XbaI, at the 5′ end of the primers in order to clone, the amplified product into the expression vector. For example, BamHI and XbaI correspond to the restriction enzyme sites on the bacterial expression vector pQE-9. (Qiagen, Inc., Chatsworth, Calif.). This plasmid vector encodes antibiotic resistance (Amp^{r}), a bacterial origin of replication (ori), an IPTG-regulatable promoter/operator (P/O), a ribosome binding site (RBS), a 6-histidine tag (6-His), and restriction enzyme cloning sites.

[0950] The pQE-9 vector is digested with BamHI and XbaI and the amplified fragment is ligated into the pQE-9 vector maintaining the reading frame initiated at the bacterial RBS. The ligation mixture is then used to transform the E. coli strain M15/rep4 (Qiagen, Inc.) which contains multiple copies of the plasmid pREP4, which expresses the lacl repressor and also confers kanamycin resistance (Kan^{r}). Transformants are identified by their ability to grow on LB plates and ampicillin/kanamycin resistant colonies are selected. Plasmid DNA is isolated and confirmed by restriction analysis.

[0951] Clones containing the desired constructs are grown overnight (O/N) in liquid culture in LB media supplemented with both Amp (100 ug/ml) and Kan (25 ug/ml). The O/N culture is used to inoculate a large culture at a ratio of 1:100 to 1:250. The cells are grown to an optical density 600 (O.D.⁶⁰⁰) of between 0.4 and 0.6. IPTG (Isopropyl-B-D-thiogalacto pyranoside) is then added to a final concentration of 1 mM. IPTG induces by inactivating the lacI repressor, clearing the P/O leading to increased gene expression.

[0952] Cells are grown for an extra 3 to 4 hours. Cells are then harvested by centrifugation (20 mins at 6000×g). The cell pellet is solubilized in the chaotropic agent 6 Molar Guanidine HCl by stirring for 3-4 hours at 4° C. The cell debris is removed by centrifugation, and the supernatant containing the polypeptide is loaded onto a nickel-nitrilo-tri-acetic acid (“Ni-NTA”) affinity resin column (available from QIAGEN, Inc., supra). Proteins with a 6×His tag bind to the Ni—NTA resin with high affinity and can be purified in a simple one-step procedure (for details see: The QIAexpressionist (1995) QIAGEN, Inc., supra).

[0953] Briefly, the supernatant is loaded onto the column in 6 M guanidine-HCl, pH 8. The column is first washed with 10 volumes of 6 M guanidine-HCl, pH 8, then washed with 10 volumes of 6 M guanidine-HCl pH 6, and finally the polypeptide is eluted with 6 M guanidine-HCl, pH 5.

[0954] The purified protein is then renatured by dialyzing it against phosphate-buffered saline (PBS) or 50 mM Na-acetate, pH 6 buffer plus 200 mM NaCl. Alternatively, the protein can be successfully refolded while immobilized on the Ni-NTA column. The recommended conditions are as follows: renature using a linear 6M-1M urea gradient in 500 mM NaCl, 20% glycerol, 20 mM Tris/HCl pH 7.4, containing protease inhibitors. The renaturation should be performed over a period of 1.5 hours or more. After renaturation the proteins are eluted by the addition of 250 mM immidazole. Immidazole is removed by a final dialyzing step against PBS or 50 mM sodium acetate pH 6 buffer plus 200 mM NaCl. The purified protein is stored at 4° C. or frozen at −80° C.

[0955] In addition to the above expression vector, the present invention further includes an expression vector, called pHE4a (ATCC Accession Number 209645, deposited on Feb. 25, 1998) which contains phage operator and promoter elements operatively linked to a polynucleotide of the present invention. This vector contains: 1) a neomycinphosphotransferase gene as a selection marker, 2) an E. coli origin of replication, 3) a T5 phage promoter sequence, 4) two lac operator sequences, 5) a Shine-Delgamo sequence, and 6) the lactose operon repressor gene (lacIq). The origin of replication (oriC) is derived from pUC19 (LTI, Gaithersburg, Md.). The promoter and operator sequences are made synthetically.

[0956] DNA can be inserted into the pHE4a by restricting the vector with NdeI and XbaI, BamHI, XhoI, or Asp718, running the restricted product on a gel, and isolating the larger fragment (the stuffer fragment should be about 310 base pairs). The DNA insert is generated according to the PCR protocol described in Example 1, using PCR primers having restriction sites for NdeI (5′ primer) and XbaI, BamHI, XhoI, or Asp718 (3′ primer). The PCR insert is gel purified and restricted with compatible enzymes. The insert and vector are ligated according to standard protocols.

[0957] The engineered vector could easily be substituted in the above protocol to express protein in a bacterial system.

### Example 6

### Purification of a Polypeptide from an Inclusion Body

[0958] The following alternative method can be used to purify a polypeptide expressed in E. coli when it is present in the form of inclusion bodies. Unless otherwise specified, all of the following steps are conducted at 4-10° C.

[0959] Upon completion of the production phase of the E. coli fermentation, the cell culture is cooled to 4-10° C. and the cells harvested by continuous centrifugation at 15,000 rpm (Heraeus Sepatech). On the basis of the expected yield of protein per unit weight of cell paste and the amount of purified protein required, an appropriate amount of cell paste, by weight, is suspended in a buffer solution containing 100 mM Tris, 50 mM EDTA, pH 7.4. The cells are dispersed to a homogeneous suspension using a high shear mixer.

[0960] The cells are then lysed by passing the solution through a microfluidizer (Microfuidics, Corp. or APV Gaulin, Inc.) twice at 4000-6000 psi. The homogenate is then mixed with NaCl solution to a final concentration of 0.5 M NaCl, followed by centrifugation at 7000×g for 15 min. The resultant-pellet is washed again using 0.5M NaCl, 100 mM Tris, 50 mM EDTA, pH 7.4.

[0961] The resulting washed inclusion bodies are solubilized with 1.5 M guanidine hydrochloride (GuHCl) for 2-4 hours. After 7000×g centrifugation for 15 min., the pellet is discarded and the polypeptide containing supernatant is incubated at 4° C. overnight to allow further GuHCl extraction.

[0962] Following high speed centrifugation (30,000×g) to remove insoluble particles, the GuHCl solubilized protein is refolded by quickly mixing the GuHCl extract with 20 volumes of buffer containing 50 mM sodium, pH 4.5, 150 mM NaCl, 2 mM EDTA by vigorous stirring. The refolded diluted protein solution is kept at 4° C. without mixing for 12 hours prior to further purification steps.

[0963] To clarify the refolded polypeptide solution, a previously prepared tangential filtration unit equipped with 0.16 μm membrane filter with appropriate surface area (e.g., Filtron), equilibrated with 40 mM sodium acetate, pH 6.0 is employed. The filtered sample is loaded onto a cation exchange resin (e.g., Poros HS-50 Perseptive Biosystems). The column is washed with 40 mM sodium acetate, pH 6.0 and eluted with 250 mM, 500 mM, 1000 mM, and 1500 mM NaCl in the same buffer, in a stepwise manner. The absorbance at 280 nm of the effluent is continuously monitored. Fractions are collected and further analyzed by SDS-PAGE.

[0964] Fractions containing the polypeptide are then pooled and mixed with 4 volumes of water. The diluted sample is then loaded onto a previously prepared set of tandem columns of strong anion (Poros HQ-50, Perseptive Biosystems) and weak anion (Poros CM-20, Perseptive Biosystems) exchange resins. The columns are equilibrated with 40 mM sodium acetate, pH 6.0. Both columns are washed with 40 mM sodium acetate, pH 6.0, 200 mM NaCl. The CM-20 column is then eluted using a 10 column volume linear gradient ranging from 0.2 M NaCl, 50 mM sodium acetate, pH 6.0 to 1.0 M NaCl, 50 mM sodium acetate, pH 6.5. Fractions are collected under constant A₂₈₀ monitoring of the effluent. Fractions containing the polypeptide (determined, for instance, by 16% SDS-PAGE) are then pooled.

[0965] The resultant polypeptide should exhibit greater than 95% purity after the above refolding and purification steps. No major contaminant bands should be observed from Commassie blue stained 16% SDS-PAGE gel when 5 μg of purified protein is loaded. The purified protein can also be tested for endotoxin/LPS contamination, and typically the LPS content is less than 0.1 ng/ml according to LAL assays.

### Example 7

### Cloning and Expression of a Polypeptide in a Baculovirus Expression System

[0966] In this example, the plasmid shuttle vector pA2 is used to insert a polynucleotide into a baculovirus to express a polypeptide. This expression vector contains the strong polyhedrin promoter of the Autographa californica nuclear polyhedrosis virus (AcMNPV) followed by convenient restriction sites such as BamHI, Xba I and Asp718. The polyadenylation site of the simian virus 40 (“SV40”) is used for efficient polyadenylation. For easy selection of recombinant virus, the plasmid contains the beta-galactosidase gene from E. coli under control of a weak Drosophila promoter in the same orientation, followed by the polyadenylation signal of the polyhedrin gene. The inserted genes are flanked on both sides by viral sequences for cell-mediated homologous recombination with wild-type viral DNA to generate a viable virus that express the cloned polynucleotide.

[0967] Many other baculovirus vectors can be used in place of the vector above, such as pAc373, pVL941, and pAcIM1, as one skilled in the art would readily appreciate, as long as the construct provides appropriately located signals for transcription, translation, secretion and the like, including a signal peptide and an in-frame AUG as required. Such vectors are described, for instance, in Luckow et al., Virology 170:31-39 (1989).

[0968] Specifically, the cDNA sequence contained in the deposited clone, including the AUG initiation codon, is amplified using the PCR protocol described in Example 1. If a naturally occurring signal sequence is used to produce the polypeptide of the present invention, the pA2 vector does not need a second signal peptide. Alternatively, the vector can be modified (pA2 GP) to include a baculovirus leader sequence, using the standard methods described in Summers et al., “A Manual of Methods for Baculovirus Vectors and Insect Cell Culture Procedures,” Texas Agricultural Experimental Station Bulletin No. 1555 (1987).

[0969] The amplified fragment is isolated from a 1% agarose gel using a commercially available kit (“Geneclean,” BIO 101 Inc., La Jolla, Calif.). The fragment then is digested with appropriate restriction enzymes and again purified on a 1% agarose gel.

[0970] The plasmid is digested with the corresponding restriction enzymes and optionally, can be dephosphorylated using calf intestinal phosphatase, using routine procedures known in the art. The DNA is then isolated from a 1% agarose gel using a commercially available kit (“Geneclean” BIO 101 Inc., La Jolla, Calif.).

[0971] The fragment and the dephosphorylated plasmid are ligated together with T4D DNA ligase. E. coli HB101 or other suitable E. coli hosts such as XL-1 Blue (Stratagene Cloning Systems, La Jolla, Calif.) cells are transformed with the ligation mixture and spread on culture plates. Bacteria containing the plasmid are identified by digesting DNA from individual colonies and analyzing the digestion product by gel electrophoresis. The sequence of the cloned fragment is confirmed by DNA sequencing.

[0972] Five μg of a plasmid containing the polynucleotide is co-transfected with 1.0 μg of a commercially available linearized baculovirus DNA (“BaculoGold™ baculovirus DNA”, Pharmingen, San Diego, Calif.), using the lipofection method described by Feigner et al., Proc. Natl. Acad. Sci. USA 84:7413-7417 (1987). One μg of BaculoGold™ virus DNA and 5 μg of the plasmid are mixed in a sterile well of a microtiter plate containing 50 μl of serum-free Grace's medium (Life Technologies Inc., Gaithersburg, Md.). Afterwards, 10 μl Lipofectin plus 90 μl Grace's medium are added, mixed and incubated for 15 minutes at room temperature. Then the transfection mixture is added drop-wise to Sf9 insect cells (ATCC CRL 1711) seeded in a 35 mm tissue culture plate with 1 ml Grace's medium without serum. The plate is then incubated for 5 hours at 27° C. The transfection solution is then removed from the plate and 1 ml of Grace's insect medium supplemented with 10% fetal calf serum is added. Cultivation is then continued at 27° C. for four days.

[0973] After four days the supernatant is collected and a plaque assay is performed, as described by Summers and Smith, supra. An agarose gel with “Blue Gal” (Life Technologies Inc., Gaithersburg) is used to allow easy identification and isolation of gal-expressing clones, which produce blue-stained plaques. (A detailed description of a “plaque assay” of this type can also be found in the user's guide for insect cell culture and baculovirology distributed by Life Technologies Inc., Gaithersburg, page 9-10.) After appropriate incubation, blue stained plaques are picked with the tip of a micropipettor (e.g., Eppendorf). The agar containing the recombinant viruses is then resuspended in a microcentrifuge tube containing 200 μl of Grace's medium and the suspension containing the recombinant baculovirus is used to infect Sf9 cells seeded in 35 mm dishes. Four days later the supernatants of these culture dishes are harvested and then they are stored at 4° C.

[0974] To verify the expression of the polypeptide, Sf9 cells are grown in Grace's medium supplemented with 10% heat-inactivated FBS. The cells are infected with the recombinant baculovirus containing the polynucleotide at a multiplicity of infection (“MOI”) of about 2. If radiolabeled proteins are desired, 6 hours later the medium is removed and is replaced with SF900 II medium minus methionine and cysteine (available from Life Technologies Inc., Rockville, Md.). After 42 hours, 5 μCi of³⁵S-methionine and 5 μCi ³⁵S-cysteine (available from Amersham) are added. The cells are further incubated for 16 hours and then are harvested by centrifugation. The proteins in the supernatant as well as the intracellular proteins are analyzed by SDS-PAGE followed by autoradiography (if radiolabeled).

[0975] Microsequencing of the amino acid sequence of the amino terminus of purified protein may be used to determine the amino terminal sequence of the produced protein.

### Example 8

### Expression of a Polypeptide in Mammalian Cells

[0976] The polypeptide of the present invention can be expressed in a mammalian cell. A typical mammalian expression vector contains a promoter element, which mediates the initiation of transcription of mRNA, a protein coding sequence, and signals required for the termination of transcription and polyadenylation of the transcript. Additional elements include enhancers, Kozak sequences and intervening sequences flanked by donor and acceptor sites for RNA splicing. Highly efficient transcription is achieved with the early and late promoters from SV40, the long terminal repeats (LTRs) from Retroviruses, e.g., RSV, HTLVI, HIVI and the early promoter of the cytomegalovirus (CMV). However, cellular elements can also be used (e.g., the human actin promoter).

[0977] Suitable expression vectors for use in practicing the present invention include, for example, vectors such as pSVL and pMSG (Pharmacia, Uppsala, Sweden), pRSVcat (ATCC 37152), pSV2dhfr (ATCC 37146), pBC12MI (ATCC 67109), pCMVSport 2.0, and pCMVSport 3.0. Mammalian host cells that could be used include, human Hela, 293, H9 and Jurkat cells, mouse NIH3T3 and C127 cells, Cos 1, Cos 7 and CVI, quail QC1-3 cells, mouse L cells and Chinese hamster ovary (CHO) cells.

[0978] Alternatively, the polypeptide can be expressed in stable cell lines containing the polynucleotide integrated into a chromosome. The co-transfection with a selectable marker such as DHFR, gpt, neomycin, or hygromycin allows the identification and isolation of the transfected cells.

[0979] The transfected gene can also be amplified to express large amounts of the encoded protein. The DHFR (dihydrofolate reductase) marker is useful in developing cell lines that carry several hundred or even several thousand copies of the gene of interest. (See, e.g., Alt, F. W., et al., J. Biol. Chem. 253:1357-1370 (1978); Hamlin, J. L. and Ma, C., Biochem. et Biophys. Acta, 1097:107-143 (1990); Page, M. J. and Sydenham, M. A., Biotechnology 9:64-68 (1991).) Another useful selection marker is the enzyme glutamine synthase (GS) (Murphy et al., Biochem J. 227:277-279 (1991); Bebbington et al., Bio/Technology 10:169-175 (1992). Using these markers, the mammalian cells are grown in selective medium and the cells with the highest resistance are selected. These cell lines contain the amplified gene(s) integrated into a chromosome. Chinese hamster ovary (CHO) and NSO cells are often used for the production of proteins.

[0980] Derivatives of the plasmid pSV2-dhfr (ATCC Accession No. 37146), the expression vectors pC4 (ATCC Accession No. 209646) and pC6 (ATCC Accession No.209647) contain the strong promoter (LTR) of the Rous Sarcoma Virus (Cullen et al., Molecular and Cellular Biology, 438-447 (March, 1985)) plus a fragment of the CMV-enhancer (Boshart et al., Cell 41:521-530 (1985).) Multiple cloning sites, e.g., with the restriction enzyme cleavage sites BamHI, XbaI and Asp718, facilitate the cloning of the gene of interest. The vectors also contain the 3′ intron, the polyadenylation and termination signal of the rat preproinsulin gene, and the mouse DHFR gene under control of the SV40 early promoter.

[0981] Specifically, the plasmid pC6, for example, is digested with appropriate restriction enzymes and then dephosphorylated using calf intestinal phosphates by procedures known in the art. The vector is then isolated from a 1% agarose gel.

[0982] A polynucleotide of the present invention is amplified according to the protocol outlined in Example 1. If a naturally occurring signal sequence is used to produce the polypeptide of the present invention, the vector does not need a second signal peptide. Alternatively, if a naturally occurring signal sequence is not used, the vector can be modified to include a heterologous signal sequence. (See, e.g., International Publication No. WO 96/34891.)

[0983] The amplified fragment is isolated from a 1% agarose gel using a commercially available kit (“Geneclean,” BIO 101 Inc., La Jolla, Calif.). The fragment then is digested with appropriate restriction enzymes and again purified on a 1% agarose gel.

[0984] The amplified fragment is then digested with the same restriction enzyme and purified on a 1% agarose gel. The isolated fragment and the dephosphorylated vector are then ligated with T4 DNA ligase. E. coli HB101 or XL-1 Blue cells are then transformed and bacteria are identified that contain the fragment inserted into plasmid pC6 using, for instance, restriction enzyme analysis.

[0985] Chinese hamster ovary cells lacking an active DHFR gene is used for transfection. Five μg of the expression plasmid pC6 or pC4 is cotransfected with 0.5 μg of the plasmid pSVneo using lipofectin (Felgner et al., supra). The plasmid pSV2-neo contains a dominant selectable marker, the neo gene from Tn5 encoding an enzyme that confers resistance to a group of antibiotics including G418. The cells are seeded in alpha minus MEM supplemented with 1 mg/ml G418. After 2 days, the cells are trypsinized and seeded in hybridoma cloning plates (Greiner, Germany) in alpha minus MEM supplemented with 10, 25, or 50 ng/ml of methottexate plus 1 mg/ml G418. After about 10-14 days single clones are trypsinized and then seeded in 6-well petri dishes or 10 ml flasks using different concentrations of methotrexate (50 nM, 100 nM, 200 nM, 400 nM, 800 nM). Clones growing at the highest concentrations of methotrexate are then transferred to new 6-well plates containing even higher concentrations of methotrexate (1 μM, 2 μM, 5 μM, 10 mM, 20 mM). The same procedure is repeated until clones are obtained which grow at a concentration of 100 -200 μM. Expression of the desired gene product is analyzed, for instance, by SDS-PAGE and Western blot or by reversed phase HPLC analysis.

### Example 9

### Protein Fusions

[0986] The polypeptides of the present invention are preferably fused to other proteins. These fusion proteins can be used for a variety of applications. For example, fusion of the present polypeptides to His-tag, HA-tag, protein A, IgG domains, and maltose binding protein facilitates purification. (See Example 5; see also EP A 394,827; Traunecker, et al., Nature 331:84-86 (1988).) Similarly, fusion to IgG-1, IgG-3, and albumin increases the halflife time in vivo. Nuclear localization signals fused to the polypeptides of the present invention can target the protein to a specific subcellular localization, while covalent heterodimer or homodimers can increase or decrease the activity of a fusion protein. Fusion proteins can also create chimeric molecules having more than one function. Finally, fusion proteins can increase solubility and/or stability of the fused protein compared to the non-fused protein. All of the types of fusion proteins described above can be made by modifying the following protocol, which outlines the fusion of a polypeptide to an IgG molecule, or the protocol described in Example 5.

[0987] Briefly, the human Fc portion of the IgG molecule can be PCR amplified, using primers that span the 5′ and 3′ ends of the sequence described below. These primers also should have convenient restriction enzyme sites that will facilitate cloning into an expression vector, preferably a mammalian expression vector.

[0988] For example, if pC4 (ATCC Accession No. 209646) is used, the human Fc portion can be ligated into the BamHI cloning site. Note that the 3′ BamHI site should be destroyed. Next, the vector containing the human Fc portion is re-restricted with BamHI, linearizing the vector, and a polynucleotide of the present invention, isolated by the PCR protocol described in Example 1, is ligated into this BamHI site. Note that the polynucleotide is cloned without a stop codon, otherwise a fusion protein will not be produced.

[0989] If the naturally occurring signal sequence is used to produce the polypeptide of the present invention, pC4 does not need a second signal peptide. Alternatively, if the naturally occurring signal sequence is not used, the vector can be modified to include a heterologous signal sequence. (See, e.g., International Publication No. WO 96/34891.)

Human IgG Fc region:

(SEQ ID NO: 1)

GGGATCCGGAGCCCAAATCTTCTGACAAAACTCACACATGCCCACCGTGCC
CAGCACCTGAATTCGAGGGTGCACCGTCAGTCTTCCTCTTCCCCCCAAAAC
CCAAGGACACCCTCATGATCTCCCGGACTCCTGAGGTCACATGCGTGGTGG
TGGACGTAAGCCACGAAGACCCTGAGGTCAAGTTCAACTGGTACGTCGACG
GCGTGGAGGTGCATAATGCCAAGACAAAGCCGCGGGAGGAGCAGTACAACA
GCACGTACCGTGTGGTCAGCGTCCTCACCGTCCTGCACCAGGACTGGCTGA
ATGGCAAGGAGTACAAGTGCAAGGTCTCCAACAAAGCCCTCCCAACCCCCA
TCGAGAAAACCATCTCCAAAGCCAAAGGGCAGCCCCGAGAACCACAGGTGT
ACACCCTGCCCCCATCCCGGGATGAGCTGACCAAGAACCAGGTCAGCCTGA
GCTGCCTGGTCAAAGGCTTCTATCCAAGCGACATCGCCGTGGAGTGGGAGA
GCAATGGGCAGCCGGAGAACAACTACAAGACCACGCCTCCCGTGCTGGACT
CCGACGGCTCCTTCTTCCTCTACAGCAAGCTCACCGTGGACAAGAGCAGGT
GGCAGCAGGGGAACGTCTTCTCATGCTCCGTGATGCATGAGGCTCTGCACA
ACCACTACACGCAGAAGAGCCTCTCCCTGTCTCCGGGTAAATGAGTGCGAC
GGCCGCGACTCTAGAGGAT

### Example 10

### Production of an Antibody from a Polypeptide

[0990] Hybridoma Technology

[0991] The antibodies of the present invention can be prepared by a variety of methods. (See, Current Protocols, Chapter 2.) As one example of such methods, cells expressing polypeptide of the present invention are administered to an animal to induce the production of sera containing polyclonal antibodies. In a preferred method, a preparation of polypeptide of the present invention is prepared and purified to render it substantially free of natural contaminants. Such a preparation is then introduced into an animal in order to produce polyclonal antisera of greater specific activity.

[0992] Monoclonal antibodies specific for polypeptide of the present invention are prepared using hybridoma technology (Kohler et al., Nature 256:495 (1975); Kohler et al., Eur. J. Immunol. 6:511 (1976); Kohler et al., Eur. J. Immunol. 6:292 (1976); Hammerling et al., in: Monoclonal Antibodies and T-Cell Hybridomas, Elsevier, N.Y., pp. 563-681 (1981)). In general, an animal (preferably a mouse) is immunized with polypeptide of the present invention or, more preferably, with a secreted polypeptide of the present invention-expressing cell. Such polypeptide-expressing cells are cultured in any suitable tissue culture medium, preferably in Earle's modified Eagle's medium supplemented with 10% fetal bovine serum (inactivated at about 56° C.), and supplemented with about 10 g/l of nonessential amino acids, about 1,000 U/ml of penicillin, and about 100 μg/ml of streptomycin.

[0993] The splenocytes of such mice are extracted and fused with a suitable myeloma cell line. Any suitable myeloma cell line may be employed in accordance with the present invention; however, it is preferable to employ the parent myeloma cell line (SP2O), available from the ATCC. After fusion, the resulting hybridoma cells are selectively maintained in HAT medium, and then cloned by limiting dilution as described by Wands et al. (Gastroenterology 80:225-232 (1981)). The hybridoma cells obtained through such a selection are then assayed to identify clones which secrete antibodies capable of binding the polypeptide of the present invention.

[0994] Alternatively, additional antibodies capable of binding to polypeptide of the present invention can be produced in a two-step procedure using anti-idiotypic antibodies. Such a method makes use of the fact that antibodies are themselves antigens, and therefore, it is possible to obtain an antibody which binds to a second antibody. In accordance with this method, protein specific antibodies are used to immunize an animal, preferably a mouse. The splenocytes of such an animal are then used to produce hybridoma cells, and the hybridoma cells are screened to identify clones which produce an antibody whose ability to bind to the polypeptide of the present invention-specific antibody can be blocked by polypeptide of the present invention. Such antibodies comprise anti-idiotypic antibodies to the polypeptide of the present invention-specific antibody and are used to immunize an animal to induce formation of further polypeptide of the present invention-specific antibodies.

[0995] For in vivo use of antibodies in humans, an antibody is “humanized”. Such antibodies can be produced using genetic constructs derived from hybridoma cells producing the monoclonal antibodies described above. Methods for producing chimeric and humanized antibodies are known in the art and are discussed herein. (See, for review, Morrison, Science 229:1202 (1985); Oi et al., BioTechniques 4:214 (1986); Cabilly et al., U.S. Pat. No. 4,816,567; Taniguchi et al., EP 171496; Morrison et al., EP 173494; Neuberger et al., WO 8601533; Robinson et al., International Publication No. WO 8702671; Boulianne et al., Nature 312:643 (1984); Neuberger et al., Nature 314:268 (1985).)

[0996] Isolation Of Antibody Fragments Directed Against Polypeptide of the Present Invention From A Library Of scFvs

[0997] Naturally occurring V-genes isolated from human PBLs are constructed into a library of antibody fragments which contain reactivities against polypeptide of the present invention to which the donor may or may not have been exposed (see e.g., U.S. Pat. No. 5,885,793 incorporated herein by reference in its entirety).

[0998] Rescue of the Library. A library of scFvs is constructed from the RNA of human PBLs as described in International Publication No. WO 92/01047. To rescue phage displaying antibody fragments, approximately 10⁹ E. coli harboring the phagemid are used to inoculate 50 ml of 2×TY containing 1% glucose and 100 μg/ml of ampicillin (2×TY-AMP-GLU) and grown to an O.D. of 0.8 with shaking. Five ml of this culture is used to inoculate 50 ml of 2×TY-AMP-GLU, 2×108 TU of delta gene 3 helper (M13 delta gene III, see International Publication No. WO 92/01047) are added and the culture incubated at 37° C. for 45 minutes without shaking and then at 37° C. for 45 minutes with shaking. The culture is centrifuged at 4000 r.p.m. for 10 min. and the pellet resuspended in 2 liters of 2×TY containing 100 μg/ml ampicillin and 50 ug/ml kanamycin and grown overnight. Phage are prepared as described in International Application No. WO 92/01047.

[0999] M13 delta gene III is prepared as follows: M13 delta gene III helperphage does not encode gene III protein, hence the phage(mid) displaying antibody fragments have a greater avidity of binding to antigen. Infectious M13 delta gene III particles are made by growing the helper phage in cells harboring a pUC19 derivative supplying the wild type gene III protein during phage morphogenesis. The culture is incubated for 1 hour at 37° C. without shaking and then for a further hour at 37° C. with shaking. Cells are spun down (IEC-Centra 8,400 r.p.m. for 10 min), resuspended in 300 ml 2×TY broth containing 100 μg ampicillin/ml and 25 μg kanamycin/ml (2×TY-AMP-KAN) and grown overnight, shaking at 37° C. Phage particles are purified and concentrated from the culture medium by two PEG-precipitations (Sambrook et al., 1990), resuspended in 2 ml PBS and passed through a 0.45 μm filter (Minisart NML; Sartorius) to give a final concentration of approximately 10¹³ transducing units/ml (ampicillin-resistant clones).

[1000] Panning of the Library. Immunotubes (Nunc) are coated overnight in PBS with 4 ml of either 100 μg/ml or 10 μg/mt of a polypeptide of the present invention. Tubes are blocked with 2% Marvel-PBS for 2 hours at 37° C. and then washed 3 times in PBS. Approximately 10¹³ TU of phage is applied to the tube and incubated for 30 minutes at room temperature tumbling on an over and under turntable and then left to stand for another 1.5 hours. Tubes are washed 10 times with PBS 0.1% Tween-20 and 10 times with PBS. Phage are eluted by adding 1 ml of 100 mM triethylamine and rotating 15 minutes on an under and over turntable after which the solution is immediately neutralized with 0.5 ml of 1.0M Tris-HCl, pH 7.4. Phage are then used to infect 10 ml of mid-log E. coli TG1 by incubating eluted phage with bacteria for 30 minutes at 37° C. The E. coli are then plated on TYE plates containing 1% glucose and 100 μg/ml ampicillin. The resulting bacterial library is then rescued with delta gene 3 helper phage as described above to prepare phage for a subsequent round of selection. This process is then repeated for a total of 4 rounds of affinity purification with tube-washing increased to 20 times with PBS, 0.1% Tween-20 and 20 times with PBS for rounds 3 and 4.

[1001] Characterization of Binders. Eluted phage from the 3rd and 4th rounds of selection are used to infect E. coli HB 2151 and soluble scFv is produced (Marks, et al., 1991) from single colonies for assay. ELISAs are performed with microtitre plates coated with 10 pg/ml of the polypeptide of the present invention in 50 mM bicarbonate pH 9.6. Clones positive in ELISA are further characterized by PCR fingerprinting (see, e.g., International Application No. WO 92/01047) and then by sequencing. These ELISA positive clones may also be further characterized by techniques known in the art, such as, for example, epitope mapping, binding affinity, receptor signal transduction, ability to block or competitively inhibit antibody/antigen binding, and competitive agonistic or antagonistic activity.

### Example 11

### Method of Determining Alterations in a Gene Corresponding to a Polynucleotide

[1002] RNA isolated from entire families or individual patients presenting with a phenotype of interest (such as a disease) is isolated. cDNA is then generated from these RNA samples using protocols known in the art. (See, Sambrook.) The cDNA is then used as a template for PCR, employing primers surrounding regions of interest in SEQ ID NO: X; and/or the nucleotide sequence of the cDNA contained in Clone ID NO: Z. Suggested PCR conditions consist of 35 cycles at 95 degrees C. for 30 seconds; 60-120 seconds at 52-58 degrees C.; and 60-120 seconds at 70 degrees C., using buffer solutions described in Sidransky et al., Science 252:706 (1991).

[1003] PCR products are then sequenced using primers labeled at their 5′ end with T4 polynucleotide kinase, employing SequiTherm Polymerase (Epicentre Technologies). The intron-exon boundaries of selected exons is also determined and genomic PCR products analyzed to confirm the results. PCR products harboring suspected mutations are then cloned and sequenced to validate the results of the direct sequencing.

[1004] PCR products are cloned into T-tailed vectors as described in Holton et al., Nucleic Acids Research, 19:1156 (1991) and sequenced with T7 polymerase (United States Biochemical). Affected individuals are identified by mutations not present in unaffected individuals.

[1005] Genomic rearrangements are also observed as a method of determining alterations in a gene corresponding to a polynucleotide. Genomic clones isolated according to Example 2 are nick-translated with digoxigenindeoxy-uridine 5′-triphosphate (Boehringer Manheim), and FISH performed as described in Johnson et al., Methods Cell Biol. 35:73-99 (1991). Hybridization with the labeled probe is carried out using a vast excess of human cot-1 DNA for specific hybridization to the corresponding genomic locus.

[1006] Chromosomes are counterstained with 4,6-diamino-2-phenylidole and propidium iodide, producing a combination of C- and R-bands. Aligned images for precise mapping are obtained using a triple-band filter set (Chroma Technology, Brattleboro, Vt.) in combination with a cooled charge-coupled device camera (Photometrics, Tucson, Ariz.) and variable excitation wavelength filters. (Johnson et al., Genet. Anal. Tech. Appl., 8:75 (1991).) Image collection, analysis and chromosomal fractional length measurements are performed using the ISee Graphical Program System. (Inovision Corporation, Durham, N.C.) Chromosome alterations of the genomic region hybridized by the probe are identified as insertions, deletions, and translocations. These alterations are used as a diagnostic marker for an associated disease.

### Example 12

### Method of Detecting Abnormal Levels of a Polypeptide in a Biological Sample

[1007] A polypeptide of the present invention can be detected in a biological sample, and if an increased or decreased level of the polypeptide is detected, this polypeptide is a marker for a particular phenotype. Methods of detection are numerous, and thus, it is understood that one skilled in the art can modify the following assay to fit their particular needs.

[1008] For example, antibody-sandwich ELISAs are used to detect polypeptides in a sample, preferably a biological sample. Wells of a microtiter plate are coated with specific antibodies, at a final concentration of 0.2 to 10 ug/ml. The antibodies are either monoclonal or polyclonal and are produced by the method described in Example 10. The wells are blocked so that non-specific binding of the polypeptide to the well is reduced.

[1009] The coated wells are then incubated for >2 hours at RT with a sample containing the polypeptide. Preferably, serial dilutions of the sample should be used to validate results. The plates are then washed three times with deionized or distilled water to remove unbound polypeptide.

[1010] Next, 50 ul of specific antibody-alkaline phosphatase conjugate, at a concentration of 25-400 ng, is added and incubated for 2 hours at room temperature. The plates are again washed three times with deionized or distilled water to remove unbound conjugate.

[1011] Add 75 ul of 4-methylumbelliferyl phosphate (MUP) or p-nitrophenyl phosphate (NPP) substrate solution to each well and incubate 1 hour at room temperature. Measure the reaction by a microtiter plate reader. Prepare a standard curve, using serial dilutions of a control sample, and plot polypeptide concentration on the X-axis (log scale) and fluorescence or absorbance of the Y-axis (linear scale). Interpolate the concentration of the polypeptide in the sample using the standard curve.

### Example 13

### Formulation

[1012] The invention also provides methods of treatment and/or prevention of diseases or disorders (such as, for example, any one or more of the diseases or disorders disclosed herein) by administration to a subject of an effective amount of a Therapeutic. By therapeutic is meant polynucleotides or polypeptides of the invention (including fragments and variants), agonists or antagonists thereof, and/or antibodies thereto, in combination with a pharmaceutically acceptable carrier type (e.g., a sterile carrier).

[1013] The Therapeutic will be formulated and dosed in a fashion consistent with good medical practice, taking into account the clinical condition of the individual patient (especially the side effects of treatment with the Therapeutic alone), the site of delivery, the method of administration, the scheduling of administration, and other factors known to practitioners. The “effective amount” for purposes herein is thus determined by such considerations.

[1014] As a general proposition, the total pharmaceutically effective amount of the Therapeutic administered parenterally per dose will be in the range of about 1 ug/kg/day to 10 mg/kg/day of patient body weight, although, as noted above, this will be subject to therapeutic discretion. More preferably, this dose is at least 0.01 mg/kg/day, and most preferably for humans between about 0.01 and 1 mg/kg/day for the hormone. If given continuously, the Therapeutic is typically administered at a dose rate of about 1 ug/kg/hour to about 50 ug/kg/hour, either by 1-4 injections per day or by continuous subcutaneous infusions, for example, using a mini-pump. An intravenous bag solution may also be employed. The length of treatment needed to observe changes and the interval following treatment for responses to occur appears to vary depending on the desired effect.

[1015] Therapeutics can be are administered orally, rectally, parenterally, intracistemally, intravaginally, intraperitoneally, topically (as by powders, ointments, gels, drops or transdermal patch), bucally, or as an oral or nasal spray. “Pharmaceutically acceptable carrier” refers to a non-toxic solid, semisolid or liquid filler, diluent, encapsulating material or formulation auxiliary of any. The term “parenteral” as used herein refers to modes of administration which include intravenous, intramuscular, intraperitoneal, intrasternal, subcutaneous and intraarticular injection and infusion.

[1016] Therapeutics of the invention are also suitably administered by sustained-release systems. Suitable examples of sustained-release Therapeutics are administered orally, rectally, parenterally, intracistemally, intravaginally, intraperitoneally, topically (as by powders, ointments, gels, drops or transdernal patch), bucally, or as an oral or nasal spray. “Pharmaceutically acceptable carrier” refers to a non-toxic solid, semisolid or liquid filler, diluent, encapsulating material or formulation auxiliary of any type. The term “parenteral” as used herein refers to modes of administration which include intravenous, intramuscular, intraperitoneal, intrasternal, subcutaneous and intraarticular injection and infusion.

[1017] Therapeutics of the invention are also suitably administered by sustained-release systems. Suitable examples of sustained-release Therapeutics include suitable polymeric materials (such as, for example, semi-permeable polymer matrices in the form of shaped articles, e.g., films, or mirocapsules), suitable hydrophobic materials (for example as an emulsion in an acceptable oil) or ion exchange resins, and sparingly soluble derivatives (such as, for example, a sparingly soluble salt).

[1018] Sustained-release matrices include polylactides (U.S. Pat. No. 3,773,919, EP 58,481), copolymers of L-glutamic acid and gamma-ethyl-L-glutamate (Sidman et al., Biopolymers 22:547-556 (1983)), poly (2-hydroxyethyl methacrylate) (Langer et al., J. Biomed. Mater. Res. 15:167-277 (1981), and Langer, Chem. Tech. 12:98-105 (1982)), ethylene vinyl acetate (Langer et al., Id.) or poly-D-(-)-3-hydroxybutyric acid (EP 133,988).

[1019] Sustained-release Therapeutics also include liposomally entrapped Therapeutics of the invention (see generally, Langer, Science 249:1527-1533 (1990); Treat et al., in Liposomes in the Therapy of Infectious Disease and Cancer, Lopez-Berestein and Fidler (eds.), Liss, New York, pp. 317 -327 and 353-365 (1989)). Liposomes containing the Therapeutic are prepared by methods known per se: DE 3,218,121; Epstein et al., Proc. Natl. Acad. Sci. (USA) 82:3688-3692 (1985); Hwang et al., Proc. Natl. Acad. Sci.(USA) 77:4030-4034 (1980); EP 52,322; EP 36,676; EP 88,046; EP 143,949; EP 142,641; Japanese Pat. Appl. 83-118008; U.S. Pat. Nos. 4,485,045 and 4,544,545; and EP 102,324. Ordinarily, the liposomes are of the small (about 200-800 Angstroms) unilamellar type in which the lipid content is greater than about 30 mol. percent cholesterol, the selected proportion being adjusted for the optimal Therapeutic.

[1020] In yet an additional embodiment, the Therapeutics of the invention are delivered by way of a pump (see Langer, supra; Sefton, CRC Crit. Ref. Biomed. Eng. 14:201 (1987); Buchwald et al., Surgery 88:507 (1980); Saudek et al., N. Engl. J. Med. 321:574 (1989)).

[1021] Other controlled release systems are discussed in the review by Langer (Science 249:1527-1533 (1990)).

[1022] For parenteral administration, in one embodiment, the Therapeutic is formulated generally by mixing it at the desired degree of purity, in a unit dosage injectable form (solution, suspension, or emulsion), with a pharmaceutically acceptable carrier, i.e., one that is non-toxic to recipients at the dosages and concentrations employed and is compatible with other ingredients of the formulation. For example, the formulation preferably does not include oxidizing agents and other compounds that are known to be deleterious to the Therapeutic.

[1023] Generally, the formulations are prepared by contacting the Therapeutic uniformly and intimately with liquid carriers or finely divided solid carriers or both. Then, if necessary, the product is shaped into the desired formulation. Preferably the carrier is a parenteral carrier, more preferably a solution that is isotonic with the blood of the recipient. Examples of such carrier vehicles include water, saline, Ringer's solution, and dextrose solution. Non-aqueous vehicles such as fixed oils and ethyl oleate are also useful herein, as well as liposomes.

[1024] The carrier suitably contains minor amounts of additives such as substances that enhance isotonicity and chemical stability. Such materials are non-toxic to recipients at the dosages and concentrations employed, and include buffers such as phosphate, citrate, succinate, acetic acid, and other organic acids or their salts; antioxidants such as ascorbic acid; low molecular weight (less than about ten residues) potypeptides, e.g., polyarginine or tripeptides; proteins, such as serum albumin, gelatin, or immunoglobulins; hydrophilic polymers such as polyvinylpyrrolidone; amino acids, such as glycine, glutamic acid, aspartic acid, or arginine; monosaccharides, disaccharides, and other carbohydrates including cellulose or its derivatives, glucose, manose, or dextrins; chelating agents such as EDTA; sugar alcohols such as mannitol or sorbitol; counterions such as sodium; and/or nonionic surfactants such as polysorbates, poloxamers, or PEG.

[1025] The Therapeutic is typically formulated in such vehicles at a concentration of about 0.1 mg/ml to 100 mg/ml, preferably 1-10 mg/ml, at a pH of about 3 to 8. It will be understood that the use of certain of the foregoing excipients, carriers, or stabilizers will result in the formation of polypeptide salts.

[1026] Any pharmaceutical used for therapeutic administration can be sterile. Sterility is readily accomplished by filtration through sterile filtration membranes (e.g., 0.2 micron membranes). Therapeutics generally are placed into a container having a sterile access port, for example, an intravenous solution bag or vial having a stopper pierceable by a hypodermic injection needle.

[1027] Therapeutics ordinarily will be stored in unit or multi-dose containers, for example, sealed ampoules or vials, as an aqueous solution or as a lyophilized formulation for reconstitution. As an example of a lyophilized formulation, 10-ml vials are filled with 5 ml of sterile-filtered 1% (w/v) aqueous Therapeutic solution, and the resulting mixture is lyophilized. The infusion solution is prepared by reconstituting the lyophilized Therapeutic using bacteriostatic Water-for-Injection.

[1028] The invention also provides a pharmaceutical pack or kit comprising one or more containers filled with one or more of the ingredients of the Therapeutics of the invention. Associated with such container(s) can be a notice in the form prescribed by a governmental agency regulating the manufacture, use or sale of pharmaceuticals or biological products, which notice reflects approval by the agency of manufacture, use or sale for human administration. In addition, the Therapeutics may be employed in conjunction with other therapeutic compounds.

[1029] The Therapeutics of the invention may be administered alone or in combination with adjuvants. Adjuvants that may be administered with the Therapeutics of the invention include, but are not limited to, alum, alum plus deoxycholate (ImmunoAg), MTP-PE (Biocine Corp.), QS21 (Genentech, Inc.), BCG (e.g., THERACYS®), MPL and nonviable prepartions of Corynebacterium parvum. In a specific embodiment, Therapeutics of the invention are administered in combination with alum. In another specific embodiment, Therapeutics of the invention are administered in combination with QS-21. Further adjuvants that may be administered with the Therapeutics of the invention include, but are not limited to, Monophosphoryl lipid immunomodulator, AdjuVax 100a, QS-21, QS-18, CRL1005, Aluminum salts, MF-59, and Virosomal adjuvant technology. Vaccines that may be administered with the Therapeutics of the invention include, but are not limited to, vaccines directed toward protection against MMR (measles, mumps, rubella), polio, varicella, tetanus/diptheria, hepatitis A, hepatitis B, haemophilus influenzae B, whooping cough, pneumonia, influenza, Lyme's Disease, rotavirus, cholera, yellow fever; Japanese encephalitis, poliomyelitis, rabies, typhoid fever, and pertussis. Combinations may be administered either concomitantly, e.g., as an admixture, separately but simultaneously or concurrently; or sequentially. This includes presentations in which the combined agents are administered together as a therapeutic mixture, and also procedures in which the combined agents are administered separately but simultaneously, e.g., as through separate intravenous lines into the same individual. Administration “in combination” further includes the separate administration of one of the compounds or agents given first, followed by the second.

[1030] The Therapeutics of the invention may be administered alone or in combination with other therapeutic agents. Therapeutic agents that may be administered in combination with the Therapeutics of the invention, include but not limited to, chemotherapeutic agents, antibiotics, steroidal and non-steroidal anti-inflammatories, conventional immunotherapeutic agents, and/or therapeutic treatments described below. Combinations may be administered either concomitantly, e.g., as an admixture, separately but simultaneously or concurrently; or sequentially. This includes presentations in which the combined agents are administered together as a therapeutic mixture, and also procedures in which the combined agents are administered separately but simultaneously, e.g., as through separate intravenous lines into the same individual. Administration “in combination” further includes the separate administration of one of the compounds or agents given first, followed by the second.

[1031] In certain embodiments, Therapeutics of the invention are administered in combination with antiretroviral agents, nucleoside/nucleotide reverse transcriptase inhibitors (NRTIs), non-nucleoside reverse transcriptase inhibitors (NNRTIs), and/or protease inhibitors (PIs). NRTIs that may be administered in combination with the Therapeutics of the invention, include, but are not limited to, RETROVIR™ (zidovudine/AZT), VIDEX™ (didanosine/ddI), HIVID™ (zalcitabine/ddC), ZERIT™ (stavudine/d4T), EPIVIR™ (lamivudine/3TC), and COMBIVIR™ (zidovudine/lamivudine). NNRTIs that may be administered in combination with the Therapeutics of the invention, include, but are not limited to, VIRAMUNE™ (nevirapine), RESCRIPTOR™ (delavirdine), and SUSTIVA™ (efavirenz). Protease inhibitors that may be administered in combination with the Therapeutics of the invention, include, but are not limited to, CRIXIVAN™ (indinavir), NORVIR™ (ritonavir), INVIRASE™ (saquinavir), and VIRACEPT™ (nelfinavir). In a specific embodiment, antiretroviral agents, nucleoside reverse transcriptase inhibitors, non-nucleoside reverse transcriptase inhibitors, and/or protease inhibitors may be used in any combination with Therapeutics of the invention to treat AIDS and/or to prevent or treat HIV infection.

[1032] Additional NRTIs include LODENOSINE™ (F-ddA; an acid-stable adenosine NRTI; Triangle/Abbott; COVIRACIL™ (emtricitabine/FTC; structurally related to lamivudine (3TC) but with 3- to 10-fold greater activity in vitro; Triangle/Abbott); dOTC (BCH-10652, also structurally related to lamivudine but retains activity against a substantial proportion of lamivudine-resistant isolates; Biochem Pharma); Adefovir (refused approval for anti-HIV therapy by FDA; Gilead Sciences); PREVEON® (Adefovir Dipivoxil, the active prodrug of adefovir; its active form is PMEA-pp); TENOFOVIR™ (bis-POC PMPA, a PMPA prodrug; Gilead); DAPD/DXG (active metabolite of DAPD; Triangle/Abbott); D-D4FC (related to 3TC, with activity against AZT/3TC-resistant virus); GW420867X (Glaxo Wellcome); ZIAGEN™ (abacavir/159U89; Glaxo Wellcome Inc.); CS-87 (3′ azido-2′, 3′-dideoxyuridine; WO 99/66936); and S-acyl-2-thioethyl (SATE)-bearing prodrug forms of β-L-FD4C and β-L-FddC (WO 98/17281).

[1033] Additional NNRTIs include COACTINON™ (Emivirine/MKC-442, potent NNRTI of the HEPT class; Triangle/Abbott); CAPRAVIRINE™ (AG-1549/S-1153, a next generation NNRTI with activity against viruses containing the K103N mutation; Agouron); PNU-142721 (has 20- to 50-fold greater activity than its predecessor delavirdine and is active against K103N mutants; Pharmacia & Upjohn); DPC-961 and DPC-963 (second-generation derivatives of efavirenz, designed to be active against viruses with the K103N mutation; DuPont); GW-420867X (has 25-fold greater activity than HBY097 and is active against K103N mutants; Glaxo Wellcome); CALANOLIDE A (naturally occurring agent from the latex tree; active against viruses containing either or both the Y181C and K103N mutations); and Propolis (WO 99/49830).

[1034] Additional protease inhibitors include LOPINAVIR™ (ABT378/r; Abbott Laboratories); BMS-232632 (an azapeptide; Bristol-Myres Squibb); TIPRANAVIR™ (PNU-140690, a non-peptic dihydropyrone; Pharmacia & Upjohn); PD-178390 (a nonpeptidic dihydropyrone; Parke-Davis); BMS 232632 (an azapeptide; Bristol-Myers Squibb); L-756,423 (an indinavir analog; Merck); DMP-450 (a cyclic urea compound; Avid & DuPont); AG-1776 (a peptidomimetic with in vitro activity against protease inhibitor-resistant viruses; Agouron); VX-175/GW-433,908 (phosphate prodrug of amprenavir; Vertex & Glaxo Welcome); CGP61755 (Ciba); and AGENERASE™ (amprenavir; Glaxo Wellcome Inc.).

[1035] Additional antiretroviral agents include fusion inhibitors/gp41 binders. Fusion inhibitors/gp41 binders include T-20 (a peptide from residues 643-678 of the HIV gp41 transmembrane protein ectodomain which binds to gp41 in its resting state and prevents transformation to the fusogenic state; Trimeris) and T-1249 (a second-generation fusion inhibitor; Trimeris).

[1036] Additional antiretroviral agents include fusion inhibitors/chemokine receptor antagonists. Fusion inhibitors/chemokine receptor antagonists include CXCR4 antagonists such as AMD 3100 (a bicyclam), SDF-1 and its analogs, and ALX40-4C (a cationic peptide), T22 (an 18 amino acid peptide; Trimeris) and the T22 analogs T134 and T140; CCR5 antagonists such as RANTES (9-68), AOP-RANTES, NNY-RANTES, and TAK-779; and CCR5/CXCR4 antagonists such as NSC 651016 (a distamycin analog). Also included are CCR2B, CCR3, and CCR6 antagonists. Chemokine recpetor agonists such as RANTES, SDF-1, MIP-1α, MIP-1β, etc., may also inhibit fusion.

[1037] Additional antiretroviral agents include integrase inhibitors. Integrase inhibitors include dicaffeoylquinic (DFQA) acids; L-chicoric acid (a dicaffeoyltartaric (DCTA) acid); quinalizarin (QLC) and related anthraquinones; ZINTEVIR™ (AR 177, an oligonucleotide that probably acts at cell surface rather than being a true integrase inhibitor; Arondex); and naphthols such as those disclosed in WO 98/50347.

[1038] Additional antiretroviral agents include hydroxyurea-like compunds such as BCX-34 (a purine nucleoside phosphorylase inhibitor; Biocryst); ribonucleotide reductase inhibitors such as DIDOX™ (Molecules for Health); inosine monophosphate dehydrogenase (IMPDH) inhibitors sucha as VX-497 (Vertex); and myvopholic acids such as CellCept (mycophenolate mofetil; Roche).

[1039] Additional antiretroviral agents include inhibitors of viral integrase, inhibitors of viral genome nuclear translocation such as arylene bis(methylketone) compounds; inhibitors of HIV entry such as AOP-RANTES, NNY-RANTES, RANTES-IgG fusion protein, soluble complexes of RANTES and glycosaminoglycans (GAG), and AMD-3100; nucleocapsid zinc finger inhibitors such as dithiane compounds; targets of HIV Tat and Rev; and pharmacoenhancers such as ABT-378.

[1040] Other antiretroviral therapies and adjunct therapies include cytokines and lymphokines such as MIP-1α, MIP-1β, SDF-1α, IL-2, PROLEUKIN™ (aldesleukin/L2-7001; Chiron), IL-4, IL-10, IL-12, and IL-13; interferons such as IFN-α2a; antagonists of TNFs, NFκB, GM-CSF, M-CSF, and IL-10; agents that modulate immune activation such as cyclosporin and prednisone; vaccines such as Remune™ (HIV Immunogen), APL 400-003 (Apollon), recombinant gp120 and fragments, bivalent (B/E) recombinant envelope glycoprotein, rgp120CM235, MN rgp120, SF-2 rgp120, gp120/soluble CD4 complex, Delta JR-FL protein, branched synthetic peptide derived from discontinuous gp120 C3/C4 domain, fusion-competent immunogens, and Gag, Pol, Nef, and Tat vaccines; gene-based therapies such as genetic suppressor elements (GSEs; WO 98/54366), and intrakines (genetically modified CC chemokines targetted to the ER to block surface expression of newly synthesized CCR5 (Yang et al., PNAS 94:11567-72 (1997); Chen et al., Nat. Med. 3:1110-16 (1997)); antibodies such as the anti-CXCR4 antibody 12G5, the anti-CCR5 antibodies 2D7, 5C7, PA8, PA9, PA10, PA11, PA12, and PA14, the anti-CD4 antibodies Q4120 and RPA-T4, the anti-CCR3 antibody 7B11, the anti-gp120 antibodies 17b, 48d, 447-52D, 257-D, 268-D and 50.1, anti-Tat antibodies, anti-TNF-α antibodies, and monoclonal antibody 33A; aryl hydrocarbon (AH) receptor agonists and antagonists such as TCDD, 3,3′,4,4′,5-pentachlorobiphenyl, 3,3′,4,4′-tetrachlorobiphenyl, and α-naphthoflavone (WO 98/30213); and antioxidants such as γ-L-glutamyl-L-cysteine ethyl ester (γ-GCE; WO 99/56764).

[1041] In a further embodiment, the Therapeutics of the invention are administered in combination with an antiviral agent. Antiviral agents that may be administered with the Therapeutics of the invention include, but are not limited to, acyclovir, ribavirin, amantadine, and remantidine.

[1042] In other embodiments, Therapeutics of the invention may be administered in combination with anti-opportunistic infection agents. Anti-opportunistic agents that may be administered in combination with the Therapeutics of the invention, include, but are not limited to, TRIMETHOPRIM-SULFAMETHOXAZOLE™, DAPSONE™, PENTAMIDINE™, ATOVAQUONE™, ISONIAZID™, RIFAMPIN™, PYRAZINAMIDE™, ETHAMBUTOL™, RIFABUTIN™, CLARITHROMYCIN™, AZITHROMYCIN™, GANCICLOVIR™, FOSCARNET™, CIDOFOVIR™, FLUCONAZOLE™, ITRACONAZOLE™, KETOCONAZOLE™, ACYCLOVIR™, FAMCICOLVIR™, PYRIMETHAMINE™, LEUCOVORIN™, NEUPOGEN™ (filgrastim/G-CSF), and LEUKINE™ (sargramostim/GM-CSF). In a specific embodiment, Therapeutics of the invention are used in any combination with TRIMETHOPRIM-SULFAMETHOXAZOLE™, DAPSONE™, PENTAMIDINE™, and/or ATOVAQUONE™ to prophylactically treat or prevent an opportunistic Pneumocystis carinii pneumonia infection. In another specific embodiment, Therapeutics of the invention are used in any combination with ISONIAZID™, RIFAMPIN™, PYRAZINAMIDE™, and/or ETHAMBUTOL™ to prophylactically treat or prevent an opportunistic Mycobacterium avium complex infection. In another specific embodiment, Therapeutics of the invention are used in any combination with RIFABUTIN™, CLARITHROMYCIN™, and/or AZITHROMYCIN™ to prophylactically treat or prevent an opportunistic Mycobacterium tuberculosis infection. In another specific embodiment, Therapeutics of the invention are used in any combination with GANCICLOVIR™, FOSCARNET™, and/or CIDOFOVIR™ to prophylactically treat or prevent an opportunistic cytomegalovirus infection. In another specific embodiment, Therapeutics of the invention are used in any combination with FLUCONAZOLE™, ITRACONAZOLE™, and/or KETOCONAZOLE™ to prophylactically treat or prevent an opportunistic fungal infection. In another specific embodiment, Therapeutics of the invention are used in any combination with ACYCLOVIR™ and/or FAMCICOLVIR™ to prophylactically treat or prevent an opportunistic herpes simplex virus type I and/or type II infection. In another specific embodiment, Therapeutics of the invention are used in any combination with PYRIMETHAMINE™ and/or LEUCOVORIN™ to prophylactically treat or prevent an opportunistic Toxoplasma gondii infection. In another specific embodiment, Therapeutics of the invention are used in any combination with LEUCOVORIN™ and/or NEUPOGEN™ to prophylactically treat or prevent an opportunistic bacterial infection.

[1043] In a further embodiment, the Therapeutics of the invention are administered in combination with an antibiotic agent. Antibiotic agents that may be administered with the Therapeutics of the invention include, but are not limited to, amoxicillin, beta-lactamases, aminoglycosides, beta-lactam (glycopeptide), beta-lactamases, Clindamycin, chloramphenicol, cephalosporins, ciprofloxacin, ciprofloxacin, erythromycin, fluoroquinolones, macrolides, metronidazole, penicillins, quinolones, rapamycin, rifampin, streptomycin, sulfonamide, tetracyclines, trimethoprim, trimethoprim-sulfamthoxazole, and vancomycin.

[1044] In other embodiments, Therapeutics of the invention are administered in combination with immunosuppressive agents. Immunosuppressive agents that may be administered in combination with the Therapeutics of the invention include, but are not limited to, steroids, cyclosporine, cyclosporine analogs, cyclophosphamide methylprednisone, prednisone, azathioprine, FK-506, 15-deoxyspergualin, and other immunosuppressive agents that act by suppressing the function of responding T cells. Other immunosuppressive agents that may be administered in combination with the Therapeutics of the invention include, but are not limited to, prednisolone, methotrexate, thalidomide, methoxsalen, rapamycin, leflunomide, mizoribine (BREDININ™), brequinar, deoxyspergualin, and azaspirane (SKF 105685), ORTHOCLONE OKT® 3 (muromonab-CD3), SANDIMMUNE™, NEORAL™, SANGDYA™ (cyclosporine), PROGRAF® (FK506, tacrolimus), CELLCEPT® (mycophenolate motefil, of which the active metabolite is mycophenolic acid), IMURAN™ (azathioprine), glucocorticosteroids, adrenocortical steroids such as DELTASONE™ (prednisone) and HYDELTRASOL™ (prednisolone), FOLEX™ and MEXATE™ (methotrxate), OXSORALEN-ULTRA™ (methoxsalen) and RAPAMUNE™ (sirolimus). In a specific embodiment, immunosuppressants may be used to prevent rejection of organ or bone marrow transplantation.

[1045] In an additional embodiment, Therapeutics of the invention are administered alone or in combination with one or more intravenous immune globulin preparations. Intravenous immune globulin preparations that may be administered with the Therapeutics of the invention include, but not limited to, GAMMAR™, IVEEGAM™, SANDOGLOBULIN™, GAMMAGARD S/D™, ATGAM™ (antithymocyte glubulin), and GAMIMUNE™. In a specific embodiment, Therapeutics of the invention are administered in combination with intravenous immune globulin preparations in transplantation therapy (e.g., bone marrow transplant).

[1046] In certain embodiments, the Therapeutics of the invention are administered alone or in combination with an anti-inflammatory agent. Anti-inflammatory agents that may be administered with the Therapeutics of the invention include, but are not limited to, corticosteroids (e.g. betamethasone, budesonide, cortisone, dexamethasone, hydrocortisone, methylprednisolone, prednisolone, prednisone, and triamcinolone), nonsteroidal anti-inflammatory drugs (e.g., diclofenac, diflunisal, etodolac, fenoprofen, floctafenine, flurbiprofen, ibuprofen, indomethacin, ketoprofen, meclofenamate, mefenamic acid, meloxicam, nabumetone, naproxen, oxaprozin, phenylbutazone, piroxicam, sulindac, tenoxicam, tiaprofenic acid, and tolmetin.), as well as antihistamines, aminoarylcarboxylic acid derivatives, arylacetic acid derivatives, arylbutyric acid derivatives, arylcarboxylic acids, arylpropionic acid derivatives, pyrazoles, pyrazolones, salicylic acid derivatives, thiazinecarboxamides, e-acetamidocaproic acid, S-adenosylmethionine, 3-amino-4-hydroxybutyric acid, amixetrine, bendazac, benzydamine, bucolome, difenpiramide, ditazol, emorfazone, guaiazulene, nabumetone, nimesulide, orgotein, oxaceprol, paranyline, perisoxal, pifoxime, proquazone, proxazole, and tenidap.

[1047] In an additional embodiment, the compositions of the invention are administered alone or in combination with an anti-angiogenic agent. Anti-angiogenic agents that may be administered with the compositions of the invention include, but are not limited to, Angiostatin (Entremed, Rockville, Md.), Troponin-1 (Boston Life Sciences, Boston, Mass.), anti-Invasive Factor, retinoic acid and derivatives thereof, paclitaxel (Taxol), Suramin, Tissue Inhibitor of Metalloproteinase-1, Tissue Inhibitor of Metalloproteinase-2, VEGI, Plasminogen Activator Inhibitor-1, Plasminogen Activator Inhibitor-2, and various forms of the lighter “d group” transition metals.

[1048] Lighter “d group” transition metals include, for example, vanadium, molybdenum, tungsten, titanium, niobium, and tantalum species. Such transition metal species may form transition metal complexes. Suitable complexes of the above-mentioned transition metal species include oxo transition metal complexes.

[1049] Representative examples of vanadium complexes include oxo vanadium complexes such as vanadate and vanadyl complexes. Suitable vanadate complexes include metavanadate and orthovanadate complexes such as, for example, ammonium metavanadate, sodium metavanadate, and sodium orthovanadate. Suitable vanadyl complexes include, for example, vanadyl acetylacetonate and vanadyl sulfate including vanadyl sulfate hydrates such as vanadyl sulfate mono- and trihydrates.

[1050] Representative examples of tungsten and molybdenum complexes also include oxo complexes. Suitable oxo tungsten complexes include tungstate and tungsten oxide complexes. Suitable tungstate complexes include ammonium tungstate, calcium tungstate, sodium tungstate dihydrate, and tungstic acid. Suitable tungsten oxides include tungsten (IV) oxide and tungsten (VI) oxide. Suitable oxo molybdenum complexes include molybdate, molybdenum oxide, and molybdenyl complexes. Suitable molybdate complexes include ammonium molybdate and its hydrates, sodium molybdate and its hydrates, and potassium molybdate and its hydrates. Suitable molybdenum oxides include molybdenum (VI) oxide, molybdenum (VI) oxide, and molybdic acid. Suitable molybdenyl complexes include, for example, molybdenyl acetylacetonate. Other suitable tungsten and molybdenum complexes include hydroxo derivatives derived from, for example, glycerol, tartaric acid, and sugars.

[1051] A wide variety of other anti-angiogenic factors may also be utilized within the context of the present invention. Representative examples include, but are not limited to, platelet factor 4; protamine sulphate; sulphated chitin derivatives (prepared from queen crab shells), (Murata et al., Cancer Res. 51:22-26, (1991)); Sulphated Polysaccharide Peptidoglycan Complex (SP-PG) (the function of this compound may be enhanced by the presence of steroids such as estrogen, and tamoxifen citrate); Staurosporine; modulators of matrix metabolism, including for example, proline analogs, cishydroxyproline, d,L-3,4-dehydroproline, Thiaproline, alpha,alpha-dipyridyl, aminopropionitrile fumarate; 4-propyl-5-(4-pyridinyl)-2(3H)-oxazolone; Methotrexate; Mitoxantrone; Heparin; Interferons; 2 Macroglobulin-serum; ChIMP-3 (Pavloff et al., J. Bio. Chem. 267:17321-17326, (1992)); Chymostatin (Toinkinson et al., Biochem J. 286:475-480, (1992)); Cyclodextrin Tetradecasulfate; Eponemycin; Camptothecin; Fumagillin (Ingber et al., Nature 348:555-557, (1990)); Gold Sodium Thiomalate (“GST”; Matsubara and Ziff, J. Clin. Invest. 79:1440-1446, (1987)); anticollagenase-serum; alpha2-antiplasmin (Holmes et al., J. Biol. Chem. 262(4):1659-1664, (1987)); Bisantrene (National Cancer Institute); Lobenzarit disodium (N-(2)-carboxyphenyl-4-chloroanthronilic acid disodium or “CCA”; (Takeuchi et al., Agents Actions 36:312-316, (1992)); and metalloproteinase inhibitors such as BB94.

[1052] Additional anti-angiogenic factors that may also be utilized within the context of the present invention include Thalidomide, (Celgene, Warren, N.J.); Angiostatic steroid; AGM-1470 (H. Brem and J. Folkman J Pediatr. Surg. 28:445-51 (1993)); an integrin alpha v beta 3 antagonist (C. Storgard et al., J Clin. Invest. 103:47-54 (1999)); carboxynaminolmidazole; Carboxyamidotriazole (CAI) (National Cancer Institute, Bethesda, Md.); Conbretastatin A-4 (CA4P) (OXiGENE, Boston, Mass.); Squalamine (Magainin Pharmaceuticals, Plymouth Meeting, Pa.); TNP-470, (Tap Pharmaceuticals, Deerfield, Ill.); ZD-0101 AstraZeneca (London, UK); APRA (CT2584); Benefin, Byrostatin-1 (SC339555); CGP-41251 (PKC 412); CM101; Dexrazoxane (ICRF187); DMXAA; Endostatin; Flavopridiol; Genestein; GTE; ImmTher; Iressa (ZD1839); Octreotide (Somatostatin); Panretin; Penacillamine; Photopoint; PI-88; Prinomastat (AG-3340) Purlytin; Suradista (FCE26644); Tamoxifen (Nolvadex); Tazarotene; Tetrathiomolybdate; Xeloda (Capecitabine); and 5-Fluorouracil.

[1053] Anti-angiogenic agents that may be administed in combination with the compounds of the invention may work through a variety of mechanisms including, but not limited to, inhibiting proteolysis of the extracellular matrix, blocking the function of endothelial cell-extracellular matrix adhesion molecules, by antagonizing the function of angiogenesis inducers such as growth factors, and inhibiting integrin receptors expressed on proliferating endothelial cells. Examples of anti-angiogenic inhibitors that interfere with extraceilular matrix proteolysis and which may be administered in combination with the compositons of the invention include, but are not Imited to, AG-3340 (Agouron, La Jolla, Calif.), BAY-12-9566 (Bayer, West Haven, Conn.), BMS-275291 (Bristol Myers Squibb, Princeton, N.J.), CGS-27032A (Novartis, East Hanover, N.J.), Marimastat (British Biotech, Oxford, UK), and Metastat (Aeterna, St-Foy, Quebec). Examples of anti-angiogenic inhibitors that act by blocking the function of endothelial cell-extracellular matrix adhesion molecules and which may be administered in combination with the compositons of the invention include, but are not Imited to, EMD-121974 (Merck KcgaA Darmstadt, Germany) and Vitaxin (Ixsys, La Jolla, Calif./Medimmune, Gaithersburg, Md.). Examples of anti-angiogenic agents that act by directly antagonizing or inhibiting angiogenesis inducers and which may be administered in combination with the compositons of the invention include, but are not lmited to, Angiozyme (Ribozyme, Boulder, Colo.), Anti-VEGF antibody (Genentech, S. San Francisco, Calif.), PTK-787/ZK-225846 (Novartis, Basel, Switzerland), SU-101 (Sugen, S. San Francisco, Calif.), SU-5416 (Sugen/Pharmacia Upjohn, Bridgewater, N.J.), and SU-6668 (Sugen). Other anti-angiogenic agents act to indirectly inhibit angiogenesis. Examples of indirect inhibitors of angiogenesis which may be administered in combination with the compositons of the invention include, but are not limited to, IM-862 (Cytran, Kirkland, Wash.), Interferon-alpha, IL-12 (Roche, Nutley, N.J.), and Pentosan polysulfate (Georgetown University, Washington, D.C.).

[1054] In particular embodiments, the use of compositions of the invention in combination with anti-angiogenic agents is contemplated for the treatment, prevention, and/or amelioration of an autoimmune disease, such as for example, an autoimmune disease described herein.

[1055] In a particular embodiment, the use of compositions of the invention in combination with anti-angiogenic agents is contemplated for the treatment, prevention, and/or amelioration of arthritis. In a more particular embodiment, the use of compositions of the invention in combination with anti-angiogenic agents is contemplated for the treatment, prevention, and/or amelioration of rheumatoid arthritis.

[1056] In another embodiment, the polynucleotides encoding a polypeptide of the present invention are administered in combination with an angiogenic protein, or polynucteotides encoding an angiogenic protein. Examples of angiogenic proteins that may be administered with the compositions of the invention include, but are not limited to, acidic and basic fibroblast growth factors, VEGF-1, VEGF-2, VEGF-3, epidermal growth factor alpha and beta, platelet-derived endothelial cell growth factor, platelet-derived growth factor, tumor necrosis factor alpha, hepatocyte growth factor, insulin-like growth factor, colony stimulating factor, macrophage colony stimulating factor, granulocyte/macrophage colony stimulating factor, and nitric oxide synthase.

[1057] In additional embodiments, compostions of the invention are administered in combination with a chemotherapeutic agent. Chemotherapeutic agents that may be administered with the Therapeutics of the invention include, but are not limited to alkylating agents such as nitrogen mustards (for example, Mechlorethamine, cyclophosphamide, Cyclophosphamide Ifosfamide, Melphalan (L-sarcolysin), and Chlorambucil), ethylenimines and methylmelamines (for example, Hexamethylmelamine and Thiotepa), alkyl sulfonates (for example, Busulfan), nitrosoureas (for example, Carmustine (BCNU), Lomustine (CCNU), Semustine (methyl-CCNU), and Streptozocin (streptozotocin)), triazenes (for example, Dacarbazine (DTIC; dimethyltriazenoimidazolecarboxamide)), folic acid analogs (for example, Methotrexate (amethopterin)), pyrimidine analogs (for example, Fluorouacil (5-fluorouracil; 5-FU), Floxuridine (fluorodeoxyuridine; FudR), and Cytarabine (cytosine arabinoside)), purine analogs and related inhibitors (for example, Mercaptopurine (6-mercaptopurine; 6-MP), Thioguanine (6-thioguanine; TG), and Pentostatin (2′-deoxycoformycin)), vinca alkaloids (for example, Vinblastine (VLB, vinblastine sulfate) and Vincristine (vincristine sulfate)), epipodophyllotoxins (for example, Etoposide and Teniposide), antibiotics (for example, Dactinomycin (actinomycin D), Daunorubicin (daunomycin; rubidomycin), Doxorubicin, Bleomycin, Plicamycin (mithramycin), and Mitomycin (mitomycin C), enzymes (for example, L-Asparaginase), biological response modifiers (for example, Interferon-alpha and interferon-alpha-2b), platinum coordination compounds (for example, Cisplatin (cis-DDP) and Carboplatin), anthracenedione (Mitoxantrone), substituted ureas (for example, Hydroxyurea), methylhydrazine derivatives (for example, Procarbazine (N-methyihydrazine; MIH), adrenocorticosteroids (for example, Prednisone), progestins (for example, Hydroxyprogesterone caproate, Medroxyprogesterone, Medroxyprogesterone acetate, and Megestrol acetate), estrogens (for example, Diethylstilbestrol (DES), Diethyistilbestrol diphosphate, Estradiol, and Ethinyl estradiol), antiestrogens (for example, Tamoxifen), androgens (Testosterone proprionate, and Fluoxymesterone), antiandrogens (for example, Flutamide), gonadotropin-releasing horomone analogs (for example, Leuprolide), other hormones and hormone analogs (for example, methyltestosterone, estramustine, estramustine phosphate sodium, chlorotrianisene, and testolactone), and others (for example, dicarbazine, glutamic acid, and mitotane).

[1058] In one embodiment, the compositions of the invention are administered in combination with one or more of the following drugs: infliximab (also known as Remicade™ Centocor, Inc.), Trocade (Roche, RO-32-3555), Leflunomide (also known as Arava™ from Hoechst Marion Roussel), Kineret™ (an IL-1 Receptor antagonist also known as Anakinra from Amgen, Inc.).

[1059] In a specific embodiment, compositions of the invention are administered in combination with CHOP (cyclophosphamide, doxorubicin, vincristine, and prednisone) or combination of one or more of the components of CHOP. In one embodiment, the compositions of the invention are administered in combination with anti-CD20 antibodies, human monoclonal anti-CD20 antibodies. In another embodiment, the compositions of the invention are administered in combination with anti-CD20 antibodies and CHOP, or anti-CD20 antibodies and any combination of one or more of the components of CHOP, particularly cyclophosphamide and/or prednisone. In a specific embodiment, compositions of the invention are administered in combination with Rituximab. In a further embodiment, compositions of the invention are administered with Rituximab and CHOP, or Rituximab and any combination of one or more of the components of CHOP, particularly cyclophosphamide and/or prednisone. In a specific embodiment, compositions of the invention are administered in combination with tositumomab. In a further embodiment, compositions of the invention are administered with tositumomab and CHOP, or tositumomab and any combination of one or more of the components of CHOP, particularly cyclophosphamide and/or prednisone. The anti-CD20 antibodies may optionally be associated with radioisotopes, toxins or cytotoxic prodrugs.

[1060] In another specific embodiment, the compositions of the invention are administered in combination Zevalin™. In a further embodiment, compositions of the invention are administered with Zevalin™ and CHOP, or Zevalin™ and any combination of one or more of the components of CHOP, particularly cyclophosphamide and/or prednisone. Zevalin™ may be associated with one or more radisotopes. Particularly preferred isotopes are ⁹⁰Y and ¹¹¹In.

[1061] In an additional embodiment, the Therapeutics of the invention are administered in combination with cytokines. Cytokines that may be administered with the Therapeutics of the invention include, but are not limited to, IL2, IL3, IL4, IL5, IL6, IL7, IL10, IL12, IL13, IL15, anti-CD40, CD40L, IFN-gamma and TNF-alpha. In another embodiment, Therapeutics of the invention may be administered with any interleukin, including, but not limited to, IL-1alpha, IL-1beta, IL-2, IL-3, IL-4, IL-5, IL-6, IL-7, IL-8, IL-9, IL-10, IL-11, IL-12, IL-13, IL-14, IL-15, IL-16, IL-17, IL-18, IL-19, IL-20, and IL-21.

[1062] In one embodiment, the Therapeutics of the invention are administered in combination with members of the TNF family. TNF, TNF-related or TNF-like molecules that may be administered with the Therapeutics of the invention include, but are not limited to, soluble forms of TNF-alpha, tymphotoxin-alpha (LT-alpha, also known as TNF-beta), LT-beta (found in complex heterotrimer LT-alpha2-beta), OPGL, FasL, CD27L, CD30L, CD40L, 4-IBBL, DcR3, OX40L, TNF-gamma (International Publication No. WO 96/14328), AIM-I (International Publication No. WO 97/33899), endokine-alpha (International Publication No. WO 98/07880), OPG, and neutrokine-alpha (International Publication No. WO 98/18921, OX40, and nerve growth factor (NGF), and soluble forms of Fas, CD30, CD27, CD40 and 4-IBB, TR2 (International Publication No. WO 96/34095), DR3 (International Publication No. WO 97/33904), DR4 (International Publication No. WO 98/32856), TR5 (International Publication No. WO 98/30693), TRANK, TR9 (International Publication No. WO 98/56892),TR10 (International Publication No. WO 98/54202), 312C2 (International Publication No. WO 98/06842), and TR12, and soluble forms CD154, CD70, and CD153.

[1063] In an additional embodiment, the Therapeutics of the invention are administered in combination with angiogenic proteins. Angiogenic proteins that may be administered with the Therapeutics of the invention include, but are not limited to, Glioma Derived Growth Factor (GDGF), as disclosed in European Patent Number EP-399816; Platelet Derived Growth Factor-A (PDGF-A), as disclosed in European Patent Number EP-682110; Platelet Derived Growth Factor-B (PDGF-B), as disclosed in European Patent Number EP-282317; Placental Growth Factor (PlGF), as disclosed in International Publication Number WO 92/06194; Placental Growth Factor-2 (PIGF-2), as disclosed in Hauser et al., Growth Factors, 4:259-268 (1993); Vascular Endothelial Growth Factor (VEGF), as disclosed in International Publication Number WO 90/13649; Vascular Endothelial Growth Factor-A (VEGF-A), as disclosed in European Patent Number EP-506477; Vascular Endothelial Growth Factor-2 (VEGF-2), as disclosed in International Publication Number WO 96/39515; Vascular Endothelial Growth Factor B (VEGF-3); Vascular Endothelial Growth Factor B-186 (VEGF-B186), as disclosed in International Publication Number WO 96/26736; Vascular Endothelial Growth Factor-D (VEGF-D), as disclosed in International Publication Number WO 98/02543; Vascular Endothelial Growth Factor-D (VEGF-D), as disclosed in International Publication Number WO 98/07832; and Vascular Endothelial Growth Factor-E (VEGF-E), as disclosed in German Patent Number DE19639601. The above mentioned references are herein incorporated by reference in their entireties.

[1064] In an additional embodiment, the Therapeutics of the invention are administered in combination with Fibroblast Growth Factors. Fibroblast Growth Factors that may be administered with the Therapeutics of the invention include, but are not limited to, FGF-1, FGF-2, FGF-3, FGF-4, FGF-5, FGF-6, FGF-7, FGF-8, FGF-9, FGF-10, FGF-11, FGF-12, FGF-13, FGF-14, and FGF-15.

[1065] In an additional embodiment, the Therapeutics of the invention are administered in combination with hematopoietic growth factors. Hematopoietic growth factors that may be administered with the Therapeutics of the invention include, but are not limited to, granulocyte macrophage colony stimulating factor (GM-CSF) (sargramostim, LEUKINE™, PROKINE™), granulocyte colony stimulating factor (G-CSF) (filgrastim, NEUPOGEN™), macrophage colony stimulating factor (M-CSF, CSF-1) erythropoietin (epoetin alfa, EPOGEN™, PROCRIT™), stem cell factor (SCF, c-kit ligand, steel factor), megakaryocyte colony stimulating factor, PIXY321 (a GMCSF/IL-3 fusion protein), interleukins, especially any one or more of IL-1 through IL-1 2, interferon-gamma, or thrombopoietin.

[1066] In certain embodiments, Therapeutics of the present invention are administered in combination with adrenergic blockers, such as, for example, acebutolol, atenolol, betaxolol, bisoprolol, carteolol, labetalol, metoprolol, nadolol, oxprenolol, penbutolol, pindolol, propranolol, sotalol, and timolol.

[1067] In another embodiment, the Therapeutics of the invention are administered in combination with an antiarrhythmic drug (e.g., adenosine, amidoarone, bretylium, digitalis, digoxin, digitoxin, diliazem, disopyramide, esmolol, flecainide, lidocaine, mexiletine, moricizine, phenytoin, procainamide, N-acetyl procainamide, propafenone, propranolol, quinidine, sotalol, tocainide, and verapamil).

[1068] In another embodiment, the Therapeutics of the invention are administered in combination with diuretic agents, such as carbonic anhydrase-inhibiting agents (e.g., acetazolamide, dichlorphenamide, and methazolamide), osmotic diuretics (e.g., glycerin, isosorbide, mannitol, and urea), diuretics that inhibit Na⁺—K⁺-2Cl⁻ symport (e.g., furosemide, bumetanide, azosemide, piretanide, tripamide, ethacrynic acid, muzolimine, and torsemide), thiazide and thiazide-like diuretics (e.g., bendroflumethiazide, benzthiazide, chlorothiazide, hydrochlorothiazide, hydroflumethiazide, methyclothiazide, polythiazide, trichormethiazide, chlorthalidone, indapamide, metolazone, and quinethazone), potassium sparing diuretics (e.g., amiloride and triamterene), and mineralcorticoid receptor antagonists (e.g., spironolactone, canrenone, and potassium canrenoate).

[1069] In one embodiment, the Therapeutics of the invention are administered in combination with treatments for endocrine and/or hormone imbalance disorders. Treatments for endocrine and/or hormone imbalance disorders include, but are not limited to, ¹²⁷I, radioactive isotopes of iodine such as ¹³¹I and ¹²³I; recombinant growth hormone, such as HUMATROPE™ (recombinant somatropin); growth hormone analogs such as PROTROPIN™ (somatrem); dopamine agonists such as PARLODEL™ (bromocriptine); somatostatin analogs such as SANDOSTATIN™ (octreotide); gonadotropin preparations such as PREGNYL™, A.P.L.™ and PROFASI™ (chorionic gonadotropin (CG)), PERGONAL™ (menotropins), and METRODIN™ (urofollitropin (uFSH)); synthetic human gonadotropin releasing hormone preparations such as FACTREL™ and LUTREPULSE™ (gonadorelin hydrochloride); synthetic gonadotropin agonists such as LUPRON™ (leuprolide acetate), SUPPRELIN™ (histrelin acetate), SYNAREL™ (nafarelin acetate), and ZOLADEX™ (goserelin acetate); synthetic preparations of thyrotropin-releasing hormone such as RELEFACT TRH™ and THYPINONE™ (protirelin); recombinant human TSH such as THYROGEN™; synthetic preparations of the sodium salts of the natural isomers of thyroid hormones such as L-T₄™, SYNTHROID™ and LEVOTHROID™ (levothyroxine sodium), L-T₃™, CYTOMEL™ and TRIOSTAT™ (liothyroine sodium), and THYROLAR™ (liotrix); antithyroid compounds such as 6-n-propylthiouracil (propylthiouracil), 1-methyl-2-mercaptoimidazole and TAPAZOLE™ (methimazole), NEO-MERCAZOLE™ (carbimazole); beta-adrenergic receptor antagonists such as propranolol and esmolol; Ca²⁺ channel blockers; dexamethasone and iodinated radiological contrast agents such as TELEPAQUE™ (iopanoic acid) and ORAGRAFIN™ (sodium ipodate); estrogens or congugated estrogens such as ESTRACE™ (estradiol), ESTINYL™ (ethinyl estradiol), PREMARIN™, ESTRATAB™, ORTHO-EST™, OGEN™ and estropipate (estrone), ESTROVIS™ (quinestrol), ESTRADERM™ (estradiol), DELESTROGEN™ and VALERGEN™ (estradiol valerate), DEPO-ESTRADIOL CYPIONATE™ and ESTROJECT LA™ (estradiol cypionate); antiestrogens such as NOLVADEX™ (tamoxifen), SEROPHENE™ and CLOMID™ (clomiphene); progestins such as DURALUTIN™ (hydroxyprogesterone caproate), MPA™ and DEPO-PROVERA™ (medroxyprogesterone acetate), PROVERA™ and CYCRIN™ (MPA), MEGACE™ (megestrol acetate), NORLUTIN™ (norethindrone), and NORLUTATE™ and AYGESTIN™ (norethindrone acetate); progesterone implants such as NORPLANT SYSTEM™ (subdermal implants of norgestrel); antiprogestins such as RU 486™ (mifepristone); hormonal contraceptives such as ENOVID™ (norethynodrel plus mestranol), PROGESTASERT™ (intrauterine device that releases progesterone), LOESTRIN™, BREVICON™, MODICON™, GENORA™, NELONA™, NORINYL™, OVACON-35™ and OVACON-50™ (ethinyl estradiol/norethindrone), LEVLEN™, NORDETTE™, TRI-LEVLEN™ and TRIPHASIL-21™ (ethinyl estradiol/levonorgestrel) LO/OVRAL™ and OVRAL™ (ethinyl estradiol/norgestrel), DEMULEN™ (ethinyl estradiol/ethynodiol diacetate), NORINYL™, ORTHO-NOVUM™, NORETHIN™, GENORA™, and NELOVA™ (norethindrone/mestranol), DESOGEN™ and ORTHO-CEPT™ (ethinyl estradiol/desogestrel), ORTHO-CYCLEN™ and ORTHO-TRICYCLEN™ (ethinyl estradiol/norgestimate), MICRONOR™ and NOR-QD™ (norethindrone), and OVRETTE™ (norgestrel); testosterone esters such as methenolone acetate and testosterone undecanoate; parenteral and oral androgens such as TESTOJECT-50™ (testosterone), TESTEX™ (testosterone propionate), DELATESTRYL™ (testosterone enanthate), DEPO-TESTOSTERONE™ (testosterone cypionate), DANOCRINE™ (danazol), HALOTESTIN™ (fluoxymesterone), ORETON METHYL™, TESTRED™ and VIRILON™ (methyltestosterone), and OXANDRIN™ (oxandrolone); testosterone transdermal systems such as TESTODERM™; androgen receptor antagonist and 5-alpha-reductase inhibitors such as ANDROCUR™ (cyproterone acetate), EULEXIN™ (flutamide), and PROSCAR™ (finasteride); adrenocorticotropic hormone preparations such as CORTROSYN™ (cosyntropin); adrenocortical steroids and their synthetic analogs such as ACLOVATE™ (alclometasone dipropionate), CYCLOCORT™ (amcinonide), BECLOVENT™ and VANCERIL™ (beclomethasone dipropionate), CELESTONE™ (betamethasone), BENISONE™ and UTICORT™ (betamethasone benzoate), DIPROSONE™ (betamethasone dipropionate), CELESTONE PHOSPHATE™ (betamethasone sodium phosphate), CELESTONE SOLUSPAN™ (betamethasone sodium phosphate and acetate), BETA-VAL™ and VALISONE™ (betamethasone valerate), TEMOVATE™ (clobetasol propionate), CLODERM™ (clocortolone pivalate), CORTEF™ and HYDROCORTONE™ (cortisol (hydrocortisone)), HYDROCORTONE ACETATE™ (cortisol (hydrocortisone) acetate), LOCOID™ (cortisol (hydrocortisone) butyrate), HYDROCORTONE PHOSPHATE™ (cortisol (hydrocortisone) sodium phosphate), A-HYDROCORT™ and SOLU CORTEF™ (cortisol (hydrocortisone) sodium succinate), WESTCORT™ (cortisol (hydrocortisone) valerate), CORTISONE ACETATE™ (cortisone acetate), DESOWEN™ and TRIDESILON™ (desonide), TOPICORT™ (desoximetasone), DECADRON™ (dexamethasone), DECADRON LA™ (dexamethasone acetate), DECADRON PHOSPHATE™ and HEXADROL PHOSPHATE™ (dexamethasone sodium phosphate), FLORONE™ and MAXIFLOR™ (diflorasone diacetate), FLORINEF ACETATE™ (fludrocortisone acetate), AEROBID™ and NASALIDE™ (flunisolide), FLUONID™ and SYNALAR™ (fluocinolone acetonide), LIDEX™ (fluocinonide), FLUOR-OP™ and FML™ (fluorometholone), CORDRAN™ (flurandrenolide), HALOG™ (halcinonide), HMS LIZUTFILM™ (medrysone), MEDROL™ (methylprednisolone), DEPO-MEDROL™ and MEDROL ACETATE™ (methylprednisone acetate), A-METHAPRED™ and SOLUMEDROL™ (methylprednisolone sodium succinate), ELOCON™ (mometasone furoate), HALDRONE™ (paramethasone acetate), DELTA-CORTEF™ (prednisolone), ECONOPRED™ (prednisolone acetate), HYDELTRASOL™ (prednisolone sodium phosphate), HYDELTRA-T.B.A™ (prednisolone tebutate), DELTASONE™ (prednisone), ARISTOCORT™ and KENACORT™ (triamcinolone), KENALOG™ (triamcinolone acetonide), ARISTOCORT™ and KENACORT DIACETATE™ (triamcinolone diacetate), and ARISTOSPAN™ (triamcinolone hexacetonide); inhibitors of biosynthesis and action of adrenocortical steroids such as CYTADREN™ (aminoglutethimide), NIZORAL™ (ketoconazole), MODRASTANE™ (trilostane), and METOPIRONE™ (metyrapone); bovine, porcine or human insulin or mixtures thereof; insulin analogs; recombinant human insulin such as HUMULIN™ and NOVOLIN™; oral hypoglycemic agents such as ORAMIDE™ and ORINASE™ (tolbutamide), DIABINESE™ (chlorpropamide), TOLAMIDE™ and TOLINASE™ (tolazamide), DYMELOR™ (acetohexamide), glibenclamide, MICRONASE™, DIBETA™ and GLYNASE™ (glyburide), GLUCOTROL™ (glipizide), and DIAMICRON™ (gliclazide), GLUCOPHAGE™ (metformin), ciglitazone, pioglitazone, and alpha-glucosidase inhibitors; bovine or porcine glucagon; somatostatins such as SANDOSTATIN™ (octreotide); and diazoxides such as PROGLYCEM™ (diazoxide).

[1070] In one embodiment, the Therapeutics of the invention are administered in combination with treatments for uterine motility disorders. Treatments for uterine motility disorders include, but are not limited to, estrogen drugs such as conjugated estrogens (e.g., PREMARIN® and ESTRATAB®), estradiols (e.g., CLIMARA® and ALORA®), estropipate, and chlorotrianisene; progestin drugs (e.g., AMEN® (medroxyprogesterone), MICRONOR® (norethidrone acetate), PROMETRIUM® progesterone, and megestrol acetate); and estrogen/progesterone combination therapies such as, for example, conjugated estrogens/medroxyprogesterone (e.g., PREMPRO™ and PREMPHASE®) and norethindrone acetate/ethinyl estsradiol (e.g., FEMHRT™).

[1071] In an additional embodiment, the Therapeutics of the invention are administered in combination with drugs effective in treating iron deficiency and hypochromic anemias, including but not limited to, ferrous sulfate (iron sulfate, FEOSOL™), ferrous fumarate (e.g., FEOSTAT™), ferrous gluconate (e.g., FERGON™), polysaccharide-iron complex (e.g., NIFEREX™), iron dextran injection (e.g., INFED™), cupric sulfate, pyroxidine, riboflavin, Vitamin B₁₂, cyancobalamin injection (e.g., REDISOL™, RUBRAMIN PC™), hydroxocobalamin, folic acid (e.g., FOLVITE™), leucovorin (folinic acid, 5-CHOH4PteGlu, citrovorum factor) or WELLCOVORIN (Calcium salt of leucovorin), transferrin or ferritin.

[1072] In certain embodiments, the Therapeutics of the invention are administered in combination with agents used to treat psychiatric disorders. Psychiatric drugs that may be administered with the Therapeutics of the invention include, but are not limited to, antipsychotic agents (e.g., chlorpromazine, chlorprothixene, clozapine, fluphenazine, haloperidol, loxapine, mesoridazine, molindone, olanzapine, perphenazine, pimozide, quetiapine, risperidone, thioridazine, thiothixene, trifluoperazine, and triflupromazine), antimanic agents (e.g., carbamazepine, divalproex sodium, lithium carbonate, and lithium citrate), antidepressants (e.g., amitriptyline, amoxapine, bupropion, citalopram, clomipramine, desipramine, doxepin, fluvoxamine, fluoxetine, imipramine, isocarboxazid, maprotiline, mirtazapine, nefazodone, nortriptyline, paroxetine, phenelzine, protriptyline, sertraline, tranylcypromine, trazodone, trimipramine, and venlafaxine), antianxiety agents (e.g., alprazolam, buspirone, chlordiazepoxide, clorazepate, diazepam, halazepam, lorazepam, oxazepam, and prazepam), and stimulants (e.g., d-amphetamine, methylphenidate, and pemoline).

[1073] In other embodiments, the Therapeutics of the invention are administered in combination with agents used to treat neurological disorders. Neurological agents that may be administered with the Therapeutics of the invention include, but are not limited to, antiepileptic agents (e.g., carbamazepine, clonazepam, ethosuximide, phenobarbital, phenytoin, primidone, valproic acid, divalproex sodium, felbamate, gabapentin, lamotrigine, levetiracetam, oxcarbazepine, tiagabine, topiramate, zonisamide, diazepam, lorazepam, and clonazepam), antiparkinsonian agents (e.g., levodopa/carbidopa, selegiline, amantidine, bromocriptine, pergolide, ropinirole, pramipexole, benztropine; biperiden; ethopropazine; procyclidine; trihexyphenidyl, tolcapone), and ALS therapeutics (e.g. riluzole).

[1074] In another embodiment, Therapeutics of the invention are administered in combination with vasodilating agents and/or calcium channel blocking agents. Vasodilating agents that may be administered with the Therapeutics of the invention include, but are not limited to, Angiotensin Converting Enzyme (ACE) inhibitors (e.g., papaverine, isoxsuprine, benazepril, captopril, cilazapril, enalapril, enalaprilat, fosinopril, lisinopril, moexipril, perindopril, quinapril, ramipril, spirapril, trandolapril, and nylidrin), and nitrates (e.g., isosorbide dinitrate, isosorbide mononitrate, and nitroglycerin). Examples of calcium channel blocking agents that may be administered in combination with the Therapeutics of the invention include, but are not limited to amlodipine, bepridil, diltiazem, felodipine, flunarizine, isradipine, nicardipine, nifedipine, nimodipine, and verapamil.

[1075] In additional embodiments, the Therapeutics of the invention are administered in combination with other therapeutic or prophylactic regimens, such as, for example, radiation therapy.

### Example 14

### Method of Treating Decreased Levels of the Polypeptide

[1076] The present invention relates to a method for treating an individual in need of an increased level of a polypeptide of the invention in the body comprising administering to such an individual a composition comprising a therapeutically effective amount of an agonist of the invention (including potypeptides of the invention). Moreover, it will be appreciated that conditions caused by a decrease in the standard or normal expression level of a polypeptide of the present invention in an individual can be treated by administering the agonist or antagonist of the present invention. Thus, the invention also provides a method of treatment of an individual in need of an increased level of the polypeptide comprising administering to such an individual a Therapeutic comprising an amount of the agonist or antagonist to increase the activity level of the polypeptide in such an individual.

[1077] For example, a patient with decreased levels of a polypeptide receives a daily dose 0.1-100 ug/kg of the agonist or antagonist for six consecutive days. The exact details of the dosing scheme, based on administration and formulation, are provided in Example 13.

### Example 15

### Method of Treating Increased Levels of the Polypeptide

[1078] The present invention also relates to a method of treating an individual in need of a decreased level of a polypeptide of the invention in the body comprising administering to such an individual a composition comprising a therapeutically effective amount of an antagonist of the invention (including polypeptides and antibodies of the invention).

[1079] In one example, antisense technology is used to inhibit production of a polypeptide of the present invention. This technology is one example of a method of decreasing levels of a polypeptide, due to a variety of etiologies, such as cancer.

[1080] For example, a patient diagnosed with abnormally increased levels of a polypeptide is administered intravenously antisense polynucleotides at 0.5, 1.0, 1.5, 2.0 and 3.0 mg/kg day for 21 days. This treatment is repeated after a 7-day rest period if the treatment was well tolerated. The formulation of the antisense polynucleotide is provided in Example 13.

### Example 16

### Method of Treatment Using Gene Therapy-Ex Vivo

[1081] One method of gene therapy transplants fibroblasts, which are capable of expressing a polypeptide, onto a patient. Generally, fibroblasts are obtained from a subject by skin biopsy. The resulting tissue is placed in tissue-culture medium and separated into small pieces. Small chunks of the tissue are placed on a wet surface of a tissue culture flask, approximately ten pieces are placed in each flask. The flask is turned upside down, closed tight and left at room temperature over night. After 24 hours at room temperature, the flask is inverted and the chunks of tissue remain fixed to the bottom of the flask and fresh media (e.g., Ham's F12 media, with 10% FBS, penicillin and streptomycin) is added. The flasks are then incubated at 37 degree C. for approximately one week.

[1082] At this time, fresh media is added and subsequently changed every several days. After an additional two weeks in culture, a monolayer of fibroblasts emerge. The monolayer is trypsinized and scaled into larger flasks.

[1083] pMV-7 (Kirschmeier, P. T. et al., DNA, 7:219-25 (1988)), flanked by the long terminal repeats of the Moloney murine sarcoma virus, is digested with EcoRI and HindIlI and subsequently treated with calf intestinal phosphatase. The linear vector is fractionated on agarose gel and purified, using glass beads.

[1084] The cDNA encoding a polypeptide of the present invention can be amplified using PCR primers which correspond to the 5′ and 3′ end sequences respectively as set forth in Example 1 using primers and having appropriate restriction sites and initiation/stop codons, if necessary. Preferably, the 5′ primer contains an EcoRI site and the 3′ primer includes a HindIIl site. Equal quantities of the Moloney murine sarcoma virus linear backbone and the amplified EcoRI and HindIII fragment are added together, in the presence of T4 DNA ligase. The resulting mixture is maintained under conditions appropriate for ligation of the two fragments. The ligation mixture is then used to transform bacteria HB101, which are then plated onto agar containing kanamycin for the purpose of confirming that the vector has the gene of interest properly inserted.

[1085] The amphotropic pA317 or GP+am12 packaging cells are grown in tissue culture to confluent density in Dulbecco's Modified Eagles Medium (DMEM) with 10% calf serum (CS), penicillin and streptomycin. The MSV vector containing the gene is then added to the media and the packaging cells transduced with the vector. The packaging cells now produce infectious viral particles containing the gene (the packaging cells are now referred to as producer cells).

[1086] Fresh media is added to the transduced producer cells, and subsequently, the media is harvested from a 10 cm plate of confluent producer cells. The spent media, containing the infectious viral particles, is filtered through a millipore filter to remove detached producer cells and this media is then used to infect fibroblast cells. Media is removed from a sub-confluent plate of fibroblasts and quickly replaced with the media from the producer cells. This media is removed and replaced with fresh media. If the titer of virus is high, then virtually all fibroblasts will be infected and no selection is required. If the titer is very low, then it is necessary to use a retroviral vector that has a selectable marker, such as neo or his. Once the fibroblasts have been efficiently infected, the fibroblasts are analyzed to determine whether protein is produced.

[1087] The engineered fibroblasts are then transplanted onto the host, either alone or after having been grown to confluence on cytodex 3 microcarrier beads.

### Example 17

### Gene Therapy Using Endogenous Genes Corresponding To Polynucleotides of the Invention

[1088] Another method of gene therapy according to the present invention involves operably associating the endogenous polynucleotide sequence of the invention with a promoter via homologous recombination as described, for example, in U.S. Pat. NO: 5,641,670, issued Jun. 24, 1997; International Publication NO: WO 96/29411, published Sep. 26, 1996; International Publication NO: WO 94/12650, published Aug. 4, 1994; Koller et al., Proc. Natl. Acad. Sci. USA, 86:8932-8935 (1989); and Zijlstra et al., Nature, 342:435-438 (1989). This method involves the activation of a gene which is present in the target cells, but which is not expressed in the cells, or is expressed at a lower level than desired.

[1089] Polynucleotide constructs are made which contain a promoter and targeting sequences, which are homologous to the 5′ non-coding sequence of endogenous polynucleotide sequence, flanking the promoter. The targeting sequence will be sufficiently near the 5′ end of the polynucleotide sequence so the promoter will be operably linked to the endogenous sequence upon homologous recombination. The promoter and the targeting sequences can be amplified using PCR. Preferably, the amplified promoter contains distinct restriction enzyme sites on the 5′ and 3′ ends. Preferably, the 3′ end of the first targeting sequence contains the same restriction enzyme site as the 5′ end of the amplified promoter and the 5′ end of the second targeting sequence contains the same restriction site as the 3′ end of the amplified promoter.

[1090] The amplified promoter and the amplified targeting sequences are digested with the appropriate restriction enzymes and subsequently treated with calf intestinal phosphatase. The digested promoter and digested targeting sequences are added together in the presence of T4 DNA ligase. The resulting mixture is maintained under conditions appropriate for ligation of the two fragments. The construct is size fractionated on an agarose gel, then purified by phenol extraction and ethanol precipitation.

[1091] In this Example, the polynucleotide constructs are administered as naked polynucleotides via electroporation. However, the polynucleotide constructs may also be administered with transfection-facilitating agents, such as liposomes, viral sequences, viral particles, precipitating agents, etc. Such methods of delivery are known in the art.

[1092] Once the cells are transfected, homologous recombination will take place which results in the promoter being operably linked to the endogenous polynucleotide sequence. This results in the expression of polynucleotide corresponding to the polynucleotide in the cell. Expression may be detected by immunological staining, or any other method known in the art.

[1093] Fibroblasts are obtained from a subject by skin biopsy. The resulting tissue is placed in DMEM+10% fetal calf serum. Exponentially growing or early stationary phase fibroblasts are trypsinized and rinsed from the plastic surface with nutrient medium. An aliquot of the cell suspension is removed for counting, and the remaining cells are subjected to centrifugation. The supernatant is aspirated and the pellet is resuspended in 5 ml of electroporation buffer (20 mM HEPES pH 7.3, 137 mM NaCl, 5 mM KCl, 0.7 mM Na₂ HPO_{4,} 6 mM dextrose). The cells are recentrifuged, the supernatant aspirated, and the cells resuspended in electroporation buffer containing 1 mg/ml acetylated bovine serum albumin. The final cell suspension contains approximately 3×10⁶ cells/ml. Electroporation should be performed immediately following resuspension.

[1094] Plasmid DNA is prepared according to standard techniques. For example, to construct a plasmid for targeting to the locus corresponding to the polynucleotide of the invention, plasmid pUC18 (MBI Fermentas, Amherst, N.Y.) is digested with HindIII. The CMV promoter is amplified by PCR with an XbaI site on the 5′ end and a BamHI site on the 3′ end. Two non-coding sequences are amplified via PCR: one non-coding sequence (fragment 1) is amplified with a HindIII site at the 5′ end and an Xba site at the 3′ end; the other non-coding sequence (fragment 2) is amplified with a BamHI site at the 5′ end and a HindIII site at the 3′ end. The CMV promoter and the fragments (1 and 2) are digested with the appropriate enzymes (CMV promoter—XbaI and BamHI; fragment 1—XbaI; fragment 2—BamHI) and ligated together. The resulting ligation product is digested with HindIII, and ligated with the HindIII-digested pUC18 plasmid.

[1095] Plasmid DNA is added to a sterile cuvette with a 0.4 cm electrode gap (Bio-Rad). The final DNA concentration is generally at least 120 μg/ml. 0.5 ml of the cell suspension (containing approximately 1.5.×10⁶ cells) is then added to the cuvette, and the cell suspension and DNA solutions are gently mixed. Electroporation is performed with a Gene-Pulser apparatus (Bio-Rad). Capacitance and voltage are set at 960 μF and 250-300 V, respectively. As voltage increases, cell survival decreases, but the percentage of surviving cells that stably incorporate the introduced DNA into their genome increases dramatically. Given these parameters, a pulse time of approximately 14-20 mSec should be observed.

[1096] Electroporated cells are maintained at room temperature for approximately 5 min, and the contents of the cuvette are then gently removed with a sterile transfer pipette. The cells are added directly to 10 ml of prewarmed nutrient media (DMEM with 15% calf serum) in a 10 cm dish and incubated at 37 degree C. The following day, the media is aspirated and replaced with 10 ml of fresh media and incubated for a further 16-24 hours.

[1097] The engineered fibroblasts are then injected into the host, either alone or after having been grown to confluence on cytodex 3 microcarrier beads. The fibroblasts now produce the protein product. The fibroblasts can then be introduced into a patient as described above.

### Example 18

### Method of Treatment Using Gene Therapy—In Vivo

[1098] Another aspect of the present invention is using in vivo gene therapy methods to treat disorders, diseases and conditions. The gene therapy method relates to the introduction of naked nucleic acid (DNA, RNA, and antisense DNA or RNA) sequences into an animal to increase or decrease the expression of the polypeptide. The polynucleotide of the present invention may be operatively linked to (i.e., associated with) a promoter or any other genetic elements necessary for the expression of the polypeptide by the target tissue. Such gene therapy and delivery techniques and methods are known in the art, see, for example, WO90/11092, WO98/11779; U.S. Pat. Nos. 5693622, 5705151, 5580859; Tabata et al., Cardiovasc. Res. 35(3):470-479 (1997); Chao et al., Pharmacol. Res. 35(6):517-522 (1997); Wolff, Neuromuscul. Disord. 7(5):314-318 (1997); Schwartz et al., Gene Ther. 3(5):405-411 (1996); Tsurumi et al., Circulation 94(12):3281-3290 (1996) (incorporated herein by reference).

[1099] The polynucleotide constructs may be delivered by any method that delivers injectable materials to the cells of an animal, such as, injection into the interstitial space of tissues (heart, muscle, skin, lung, liver, intestine and the like). The polynucleotide constructs can be delivered in a pharmaceutically acceptable liquid or aqueous carrier.

[1100] The term “naked” polynucleotide, DNA or RNA, refers to sequences that are free from any delivery vehicle that acts to assist, promote, or facilitate entry into the cell, including viral sequences, viral particles, liposome formulations, lipofectin or precipitating agents and the like. However, the polynucleotides of the present invention may also be delivered in liposome formulations (such as those taught in Felgner P. L. et al. (1995) Ann. NY Acad. Sci. 772:126-139 and Abdallah B. et al. (1995) Biol. Cell 85(1):1-7) which can be prepared by methods well known to those skilled in the art.

[1101] The polynucleotide vector constructs used in the gene therapy method are preferably constructs that will not integrate into the host genome nor will they contain sequences that allow for replication. Any strong promoter known to those skilled in the art can be used for driving the expression of DNA. Unlike other gene therapy techniques, one major advantage of introducing naked nucleic acid sequences into target cells is the transitory nature of the polynucleotide synthesis in the cells. Studies have shown that non-replicating DNA sequences can be introduced into cells to provide production of the desired polypeptide for periods of up to six months.

[1102] The polynucleotide construct can be delivered to the interstitial space of tissues within an animal, including muscle, skin, brain, lung, liver, spleen, bone marrow, thymus, heart, lymph, blood, bone, cartilage, pancreas, kidney, gall bladder, stomach, intestine, testis, ovary, uterus, rectum, nervous system, eye, gland, and connective tissue. Interstitial space of the tissues comprises the intercellular fluid, mucopolysaccharide matrix among the reticular fibers of organ tissues, elastic fibers in the walls of vessels or chambers, collagen fibers of fibrous tissues, or that same matrix within connective tissue ensheathing muscle cells or in the lacunae of bone. It is similarly the space occupied by the plasma of the circulation and the lymph fluid of the lymphatic channels. Delivery to the interstitial space of muscle tissue is preferred for the reasons discussed below. They may be conveniently delivered by injection into the tissues comprising these cells. They are preferably delivered to and expressed in persistent, non-dividing cells which are differentiated, although delivery and expression may be achieved in non-differentiated or less completely differentiated cells, such as, for example, stem cells of blood or skin fibroblasts. In vivo muscle cells are particularly competent in their ability to take up and express polynucleotides.

[1103] For the naked polynucleotide injection, an effective dosage amount of DNA or RNA will be in the range of from about 0.05 g/kg body weight to about 50 mg/kg body weight. Preferably the dosage will be from about 0.005 mg/kg to about 20 mg/kg and more preferably from about 0.05 mg/kg to about 5 mg/kg. Of course, as the artisan of ordinary skill will appreciate, this dosage will vary according to the tissue site of injection. The appropriate and effective dosage of nucleic acid sequence can readily be determined by those of ordinary skill in the art and may depend on the condition being treated and the route of administration. The preferred route of administration is by the parenteral route of injection into the interstitial space of tissues. However, other parenteral routes may also be used, such as, inhalation of an aerosol formulation particularly for delivery to lungs or bronchial tissues, throat or mucous membranes of the nose. In addition, naked polynucleotide constructs can be delivered to arteries during angioplasty by the catheter used in the procedure.

[1104] The dose response effects of injected polynucleotide in muscle in vivo is determined as follows. Suitable template DNA for production of mRNA coding for polypeptide of the present invention is prepared in accordance with a standard recombinant DNA methodology. The template DNA, which may be either circular or linear, is either used as naked DNA or complexed with liposomes. The quadriceps muscles of mice are then injected with various amounts of the template DNA.

[1105] Five to six week old female and male Balb/C mice are anesthetized by intraperitoneal injection with 0.3 ml of 2.5% Avertin. A 1.5 cm incision is made on the anterior thigh, and the quadriceps muscle is directly visualized. The template DNA is injected in 0.1 ml of carrier in a 1 cc syringe through a 27 gauge needle over one minute, approximately 0.5 cm from the distal insertion site of the muscle into the knee and about 0.2 cm deep. A suture is placed over the injection site for future localization, and the skin is closed with stainless steel clips.

[1106] After an appropriate incubation time (e.g., 7 days) muscle extracts are prepared by excising the entire quadriceps. Every fifth 15 um cross-section of the individual quadriceps muscles is histochemically stained for protein expression. A time course for protein expression may be done in a similar fashion except that quadriceps from different mice are harvested at different times. Persistence of DNA in muscle following injection may be determined by Southern blot analysis after preparing total cellular DNA and HIRT supernatants from injected and control mice. The results of the above experimentation in mice can be used to extrapolate proper dosages and other treatment parameters in humans and other animals using naked DNA.

### Example 19

### Transgenic Animals

[1107] The polypeptides of the invention can also be expressed in transgenic animals. Animals of any species, including, but not limited to, mice, rats, rabbits, hamsters, guinea pigs, pigs, micro-pigs, goats, sheep, cows and non-human primates, e.g., baboons, monkeys, and chimpanzees may be used to generate transgenic animals. In a specific embodiment, techniques described herein or otherwise known in the art, are used to express polypeptides of the invention in humans, as part of a gene therapy protocol.

[1108] Any technique known in the art may be used to introduce the transgene (i.e., polynucleotides of the invention) into animals to produce the founder lines of transgenic animals. Such techniques include, but are not limited to, pronuclear microinjection (Paterson et al., Appl. Microbiol. Biotechnol. 40:691-698 (1994); Carver et al., Biotechnology (NY) 11:1263-1270 (1993); Wright et al., Biotechnology (NY) 9:830-834 (1991); and Hoppe et al., U.S. Pat. No. 4,873,191 (1989)); retrovirus mediated gene transfer into germ lines (Van der Putten et al., Proc. Natl. Acad. Sci., USA 82:6148-6152 (1985)), blastocysts or embryos; gene targeting in embryonic stem cells (Thompson et al., Cell 56:313-321 (1989)); electroporation of cells or embryos (Lo, 1983, Mol Cell. Biol. 3:1803-1814 (1983)); introduction of the polynucleotides of the invention using a gene gun (see, e.g., Ulmer et al., Science 259:1745 (1993); introducing nucleic acid constructs into embryonic pleuripotent stem cells and transferring the stem cells back into the blastocyst; and sperm-mediated gene transfer (Lavitrano et al., Cell 57:717-723 (1989); etc. For a review of such techniques, see Gordon, “Transgenic Animals,” Intl. Rev. Cytol. 115:171-229 (1989), which is incorporated by reference herein in its entirety.

[1109] Any technique known in the art may be used to produce transgenic clones containing polynucleotides of the invention, for example, nuclear transfer into enucleated oocytes of nuclei from cultured embryonic, fetal, or adult cells induced to quiescence (Campell et al., Nature 380:64-66 (1996); Wilmut et al., Nature 385:810-813 (1997)).

[1110] The present invention provides for transgenic animals that carry the transgene in all their cells, as well as animals which carry the transgene in some, but not all their cells, i.e., mosaic animals or chimeric. The transgene may be integrated as a single transgene or as multiple copies such as in concatamers, e.g., head-to-head tandems or head-to-tail tandems. The transgene may also be selectively introduced into and activated in a particular cell type by following, for example, the teaching of Lasko et al. (Lasko et al., Proc. Natl. Acad. Sci. USA 89:6232-6236 (1992)). The regulatory sequences required for such a cell-type specific activation will depend upon the particular cell type of interest, and will be apparent to those of skill in the art. When it is desired that the polynucleotide transgene be integrated into the chromosomal site of the endogenous gene, gene targeting is preferred. Briefly, when such a technique is to be utilized, vectors containing some nucleotide sequences homologous to the endogenous gene are designed for the purpose of integrating, via homologous recombination with chromosomal sequences, into and disrupting the function of the nucleotide sequence of the endogenous gene. The transgene may also be selectively introduced into a particular cell type, thus inactivating the endogenous gene in only that cell type, by following, for example, the teaching of Gu et al. (Gu et al., Science 265:103-106 (1994)). The regulatory sequences required for such a cell-type specific inactivation will depend upon the particular cell type of interest, and will be apparent to those of skill in the art.

[1111] Once transgenic animals have been generated, the expression of the recombinant gene may be assayed utilizing standard techniques. Initial screening may be accomplished by Southern blot analysis or PCR techniques to analyze animal tissues to verify that integration of the transgene has taken place. The level of mRNA expression of the transgene in the tissues of the transgenic animals may also be assessed using techniques which include, but are not limited to, Northern blot analysis of tissue samples obtained from the animal, in situ hybridization analysis, and reverse transcriptase-PCR (rt-PCR). Samples of transgenic gene-expressing tissue may also be evaluated immunocytochemically or immunohistochemically using antibodies specific for the transgene product.

[1112] Once the founder animals are produced, they may be bred, inbred, outbred, or crossbred to produce colonies of the particular animal. Examples of such breeding strategies include, but are not limited to: outbreeding of founder animals with more than one integration site in order to establish separate linies; inbreeding of separate lines in order to produce compound transgenics that express the transgene at higher levels because of the effects of additive expression of each transgene; crossing of heterozygous transgenic animals to produce animals homozygous for a given integration site in order to both augment expression and eliminate the need for screening of animals by DNA analysis; crossing of separate homozygous lines to produce compound heterozygous or homozygous lines; and breeding to place the transgene on a distinct background that is appropriate for an experimental model of interest.

[1113] Transgenic animals of the invention have uses which include, but are not limited to, animal model systems useful in elaborating the biological function of potypeptides of the present invention, studying conditions and/or disorders associated with aberrant expression, and in screening for compounds effective in ameliorating such conditions and/or disorders.

### Example 20

### Knock-Out Animals

[1114] Endogenous gene expression can also be reduced by inactivating or “knocking out” the gene and/or its promoter using targeted homologous recombination. (See e.g., Smithies et al., Nature 317:230-234 (1985); Thomas & Capecchi, Cell 51:503-512 (1987); Thompson et al., Cell 5:313-321 (1989); each of which is incorporated by reference herein in its entirety.) For example, a mutant, non-functional polynucleotide of the invention (or a completely unrelated DNA sequence) flanked by DNA homologous to the endogenous polynucleotide sequence (either the coding regions or regulatory regions of the gene) can be used, with or without a selectable marker and/or a negative selectable marker, to transfect cells that express polypeptides of the invention in vivo. In another embodiment, techniques known in the art are used to generate knockouts in cells that contain, but do not express the gene of interest. Insertion of the DNA construct, via targeted homologous recombination, results in inactivation of the targeted gene. Such approaches are particularly suited in research and agricultural fields where modifications to embryonic stem cells can be used to generate animal offspring with an inactive targeted gene (e.g., see Thomas & Capecchi 1987 and Thompson 1989, supra). However this approach can be routinely adapted for use in humans provided the recombinant DNA constructs are directly administered or targeted to the required site in vivo using appropriate viral vectors that will be apparent to those of skill in the art.

[1115] In further embodiments of the invention, cells that are genetically engineered to express the polypeptides of the invention, or alternatively, that are genetically engineered not to express the polypeptides of the invention (e.g., knockouts) are administered to a patient in vivo. Such cells may be obtained from the patient (i.e., animal, including human) or an MHC compatible donor and can include, but are not limited to fibroblasts, bone marrow cells, blood cells (e.g., lymphocytes), adipocytes, muscle cells, endothelial cells etc. The cells are genetically engineered in vitro using recombinant DNA techniques to introduce the coding sequence of polypeptides of the invention into the cells, or alternatively, to disrupt the coding sequence and/or endogenous regulatory sequence associated with the polypeptides of the invention, e.g., by transduction (using viral vectors, and preferably vectors that integrate the transgene into the cell genome) or transfection procedures, including, but not limited to, the use of plasmids, cosmids, YACs, naked DNA, electroporation, liposomes, etc. The coding sequence of the polypeptides of the invention can be placed under the control of a strong constitutive or inducible promoter or promoter/enhancer to achieve expression, and preferably secretion, of the polypeptides of the invention. The engineered cells which express and preferably secrete the polypeptides of the invention can be introduced into the patient systemically, e.g., in the circulation, or intraperitoneally.

[1116] Alternatively, the cells can be incorporated into a matrix and implanted in the body, e.g., genetically engineered fibroblasts can be implanted as part of a skin graft; genetically engineered endothelial cells can be implanted as part of a lymphatic or vascular graft. (See, for example, Anderson et al. U.S. Pat. No. 5,399,349; and Mulligan & Wilson, U.S. Pat. No. 5,460,959 each of which is incorporated by reference herein in its entirety).

[1117] When the cells to be administered are non-autologous or non-MHC compatible cells, they can be administered using well known techniques which prevent the development of a host immune response against the introduced cells. For example, the cells may be introduced in an encapsulated form which, while allowing for an exchange of components with the immediate extracetlular environment, does not allow the introduced cells to be recognized by the host immune system.

[1118] Transgenic and “knock-out” animals of the invention have uses which include, but are not limited to, animal model systems useful in elaborating the biological function of polypeptides of the present invention, studying conditions and/or disorders associated with aberrant expression, and in screening for compounds effective in ameliorating such conditions and/or disorders.

### Example 21

### Assays Detecting Stimulation or Inhibition of B cell Proliferation and Differentiation

[1119] Generation of functional humoral immune responses requires both soluble and cognate signaling between B-lineage cells and their microenvironment. Signals may impart a positive stimulus that allows a B-lineage cell to continue its programmed development, or a negative stimulus that instructs the cell to arrest its current developmental pathway. To date, numerous stimulatory and inhibitory signals have been found to influence B cell responsiveness including IL-2, IL-4, IL-5, IL-6, IL-7, IL10, IL-13, IL-14 and IL-15. Interestingly, these signals are by themselves weak effectors but can, in combination with various co-stimulatory proteins, induce activation, proliferation, differentiation, homing, tolerance and death among B cell populations.

[1120] One of the best studied classes of B-cell co-stimulatory proteins is the TNF-superfamily. Within this family CD40, CD27, and CD30 along with their respective ligands CD154, CD70, and CD153 have been found to regulate a variety of immune responses. Assays which allow for the detection and/or observation of the proliferation and differentiation of these B-cell populations and their precursors are valuable tools in determining the effects various proteins may have on these B-cell populations in terms of proliferation and differentiation. Listed below are two assays designed to allow for the detection of the differentiation, proliferation, or inhibition of B-cell populations and their precursors.

[1121] In vitro Assay—Agonists or antagonists of the invention can be assessed for its ability to induce activation, proliferation, differentiation or inhibition and/or death in B-cell populations and their precursors. The activity of the agonists or antagonists of the invention on purified human tonsillar B cells, measured qualitatively over the dose range from 0.1 to 10,000 ng/mL, is assessed in a standard B-lymphocyte co-stimulation assay in which purified tonsillar B cells are cultured in the presence of either formalin-fixed Staphylococcus aureus Cowan I (SAC) or immobilized anti-human IgM antibody as the priming agent. Second signals such as IL-2 and IL-15 synergize with SAC and IgM crosslinking to elicit B cell proliferation as measured by tritiated-thymidine incorporation. Novel synergizing agents can be readily identified using this assay. The assay involves isolating human tonsillar B cells by magnetic bead (MACS) depletion of CD3-positive cells. The resulting cell population is greater than 95% B cells as assessed by expression of CD45R(B220).

[1122] Various dilutions of each sample are placed into individual wells of a 96-well plate to which are added 10⁵ B-cells suspended in culture medium (RPMI 1640 containing 10% FBS, 5×10⁻⁵ M 2ME, 100 U/ml penicillin, 10 ug/ml streptomycin, and 10⁻⁵ dilution of SAC) in a total volume of 150 ul. Proliferation or inhibition is quantitated by a 20 h pulse (luCi/well) with 3H-thymidine (6.7 Ci/mM) beginning 72 h post factor addition. The positive and negative controls are IL2 and medium respectively.

[1123] In Vivo Assay—BALB/c mice are injected (i.p.) twice per day with buffer only, or 2 mg/Kg of agonists or antagonists of the invention, or truncated forms thereof. Mice receive this treatment for 4 consecutive days, at which time they are sacrificed and various tissues and serum collected for analyses. Comparison of H&E sections from normal spleens and spleens treated with agonists or antagonists of the invention identify the results of the activity of the agonists or antagonists on spleen cells, such as the diffusion of peri-arterial lymphatic sheaths, and/or significant increases in the nucleated cellularity of the red pulp regions, which may indicate the activation of the differentiation and proliferation of B-cell populations. Immunohistochemical studies using a B cell marker, anti-CD45R(B220), are used to determine whether any physiological changes to splenic cells, such as splenic disorganization, are due to increased B-cell representation within loosely defined B-cell zones that infiltrate established T-cell regions.

[1124] Flow cytometric analyses of the spleens from mice treated with agonist or antagonist is used to indicate whether the agonists or antagonists specifically increases the proportion of ThB+, CD45R(B220)dull B cells over that which is observed in control mice.

[1125] Likewise, a predicted consequence of increased mature B-cell representation in vivo is a relative increase in serum Ig titers. Accordingly, serum IgM and IgA levels are compared between buffer and agonists or antagonists-treated mice.

[1126] The studies described in this example tested activity of agonists or antagonists of the invention. However, one skilled in the art could easily modify the exemplified studies to test the activity of polynucleotides or polypeptides of the invention (e.g., gene therapy).

### Example 22

### T Cell Proliferation Assay

[1127] A CD3-induced proliferation assay is performed on PBMCs and is measured by the uptake of ³H-thymidine. The assay is performed as follows. Ninety-six well plates are coated with 100 μl/well of mAb to CD3 (HIT3a, Pharmingen) or isotype-matched control mAb (B33.1) overnight at 4 degrees C. (1 μg/mnl in 0.05M bicarbonate buffer, pH 9.5), then washed three times with PBS. PBMC are isolated by F/H gradient centrifugation from human peripheral blood and added to quadruplicate wells (5×10⁴/well) of mAb coated plates in RPMI containing 10% FCS and P/S in the presence of varying concentrations of agonists or antagonists of the invention (total volume 200 ul). Relevant protein buffer and medium alone are controls. After 48 hr. culture at 37 degrees C., plates are spun for 2 min. at 1000 rpm and 100 μl of supernatant is removed and stored −20 degrees C. for measurement of IL-2 (or other cytokines) if effect on proliferation is observed. Wells are supplemented with 100 ul of medium containing 0.5 uCi of ³H-thymidine and cultured at 37 degrees C. for 18-24 hr. Wells are harvested and incorporation of ³H-thymidine used as a measure of proliferation. Anti-CD3 alone is the positive control for proliferation. IL-2 (100 U/ml) is also used as a control which enhances proliferation. Control antibody which does not induce proliferation of T cells is used as the negative control for the effects of agonists or antagonists of the invention.

[1128] The studies described in this example tested activity of agonists or antagonists of the invention. However, one skilled in the art could easily modify the exemplified studies to test the activity of polynucleotides or polypeptides of the invention (e.g., gene therapy).

### Example 23

### Effect of Agonists or Antagonists of the Invention on the Expression ofMHC Class II, Costimulatory and Adhesion Molecules and Cell Differentiation of Monocytes and Monocyte-Derived Human Dendritic Cells

[1129] Dendritic cells are generated by the expansion of proliferating precursors found in the peripheral blood: adherent PBMC or elutriated monocytic fractions are cultured for 7-10 days with GM-CSF (50 ng/ml) and IL-4 (20 ng/ml). These dendritic cells have the characteristic phenotype of immature cells (expression of CD1, CD80, CD86, CD40 and MHC class II antigens). Treatment with activating factors, such as TNF-α, causes a rapid change in surface phenotype (increased expression of MHC class I and II, costimulatory and adhesion molecules, downregulation of FCγRII, upregulation of CD83). These changes correlate with increased antigen-presenting capacity and with functional maturation of the dendritic cells.

[1130] FACS analysis of surface antigens is performed as follows. Cells are treated 1-3 days with increasing concentrations of agonist or antagonist of the invention or LPS (positive control), washed with PBS containing 1% BSA and 0.02 mM sodium azide, and then incubated with 1:20 dilution of appropriate FITC- or PE-labeled monoclonal antibodies for 30 minutes at 4 degrees C. After an additional wash, the labeled cells are analyzed by flow cytometry on a FACScan (Becton Dickinson).

[1131] Effect on the production of cytokines. Cytokines generated by dendritic cells, in particular IL-12, are important in the initiation of T-cell dependent immune responses. IL-12 strongly influences the development of Thl helper T-cell immune response, and induces cytotoxic T and NK cell function. An ELISA is used to measure the IL-12 release as follows. Dendritic cells (10⁶/ml) are treated with increasing concentrations of agonists or antagonists of the invention for 24 hours. LPS (100 ng/ml) is added to the cell culture as positive control. Supernatants from the cell cultures are then collected and analyzed for IL-12 content using commercial ELISA kit (e.g., R&D Systems (Minneapolis, Minn.)). The standard protocols provided with the kits are used.

[1132] Effect on the expression of MHC Class II. costimulatory and adhesion molecules. Three major families of cell surface antigens can be identified on monocytes: adhesion molecules, molecules involved in antigen presentation, and Fc receptor. Modulation of the expression of MHC class II antigens and other costimulatory molecules, such as B7 and ICAM-1, may result in changes in the antigen presenting capacity of monocytes and ability to induce T cell activation. Increased expression of Fc receptors may correlate with improved monocyte cytotoxic activity, cytokine release and phagocytosis.

[1133] FACS analysis is used to examine the surface antigens as follows. Monocytes are treated 1-5 days with increasing concentrations of agonists or antagonists of the invention or LPS (positive control), washed with PBS containing 1% BSA and 0.02 mM sodium azide, and then incubated with 1:20 dilution of appropriate FITC- or PE-labeled monoclonal antibodies for 30 minutes at 4 degrees C. After an additional wash, the labeled cells are analyzed by flow cytometry on a FACScan (Becton Dickinson).

[1134] Monocyte activation and/or increased survival. Assays for molecules that activate (or alternatively, inactivate) monocytes and/or increase monocyte survival (or alternatively, decrease monocyte survival) are known in the art and may routinely be applied to determine whether a molecule of the invention functions as an inhibitor or activator of monocytes. Agonists or antagonists of the invention can be screened using the three assays described below. For each of these assays, Peripheral blood mononuclear cells (PBMC) are purified from single donor leukopacks (American Red Cross, Baltimore, Md.) by centrifugation through a Histopaque gradient (Sigma). Monocytes are isolated from PBMC by counterflow centrifugal elutriation.

[1135] Monocyte Survival Assay. Human peripheral blood monocytes progressively lose viability when cultured in absence of serum or other stimuli. Their death results from internally regulated processes (apoptosis). Addition to the culture of activating factors, such as TNF-alpha dramatically improves cell survival and prevents DNA fragmentation. Propidium iodide (PI) staining is used to measure apoptosis as follows. Monocytes are cultured for 48 hours in polypropylene tubes in serum-free medium (positive control), in the presence of 100 ng/ml TNF-alpha (negative control), and in the presence of varying concentrations of the compound to be tested. Cells are suspended at a, concentration of 2×10⁶/ml in PBS containing PI at a final concentration of 5 μg/ml, and then incubated at room temperature for 5 minutes before FACScan analysis. PI uptake has been demonstrated to correlate with DNA fragmentation in this experimental paradigm.

[1136] Effect on cytokine release. An important function of monocytes/macrophages is their regulatory activity on other cellular populations of the immune system through the release of cytokines after stimulation. An ELISA to measure cytokine release is performed as follows. Human monocytes are incubated at a density of 5×10⁵ cells/ml with increasing concentrations of agonists or antagonists of the invention and under the same conditions, but in the absence of agonists or antagonists. For IL-12 production, the cells are primed overnight with IFN (100 U/ml) in the presence of agonist or antagonist of the invention. LPS (10 ng/ml) is then added. Conditioned media are collected after 24 h and kept frozen until use. Measurement of TNF-alpha, IL-10, MCP-1 and IL-8 is then performed using a commercially available ELISA kit (e.g., R&D Systems (Minneapolis, Minn.)) and applying the standard protocols provided with the kit.

[1137] Oxidative burst. Purified monocytes are plated in 96-w plate at 2-1×10⁵ cell/well. Increasing concentrations of agonists or antagonists of the invention are added to the wells in a total volume of 0.2 ml culture medium (RPMI 1640+10% FCS, glutamine and antibiotics). After 3 days incubation, the plates are centrifuged and the medium is removed from the wells. To the macrophage monolayers, 0.2 ml per well of phenol red solution (140 mM NaCl, 10 mM potassium phosphate buffer pH 7.0, 5.5 mM dextrose, 0.56 mM phenol red and 19 U/ml of HRPO) is added, together with the stimulant (200 nM PMA). The plates are incubated at 37° C. for 2 hours and the reaction is stopped by adding 20 μl 1N NaOH per well. The absorbance is read at 610 nm. To calculate the amount of H₂O₂ produced by the macrophages, a standard curve of a H₂O₂ solution of known molarity is performed for each experiment.

[1138] The studies described in this example tested activity of agonists or antagonists of the invention. However, one skilled in the art could easily modify the exemplified studies to test the activity of polynucleotides or polypeptides of the invention (e.g., gene therapy).

### Example 24

### Biological Effects of Agonists or Antagonists of the Invention

[1139] Astrocyte and Neuronal Assays

[1140] Agonists or antagonists of the invention, expressed in Escherichia coli and purified as described above, can be tested for activity in promoting the survival, neurite outgrowth, or phenotypic differentiation of cortical neuronal cells and for inducing the proliferation of glial fibrillary acidic protein immunopositive cells, astrocytes. The selection of cortical cells for the bioassay is based on the prevalent expression of FGF-1 and FGF-2 in cortical structures and on the previously reported enhancement of cortical neuronal survival resulting from FGF-2 treatment. A thymidine incorporation assay, for example, can be used to elucidate an agonist or antagonist of the invention's activity on these cells.

[1141] Moreover, previous reports describing the biological effects of FGF-2 (basic FGF) on cortical or hippocampal neurons in vitro have demonstrated increases in both neuron survival and neurite outgrowth (Walicke et al., “Fibroblast growth factor promotes survival of dissociated hippocampal neurons and enhances neurite extension.” Proc. Natl. Acad. Sci. USA 83:3012-3016. (1986), assay herein incorporated by reference in its entirety). However, reports from experiments done on PC-12 cells suggest that these two responses are not necessarily synonymous and may depend on not only which FGF is being tested but also on which receptor(s) are expressed on the target cells. Using the primary cortical neuronal culture paradigm, the ability of an agonist or antagonist of the invention to induce neurite outgrowth can be compared to the response achieved with FGF-2 using, for example, a thymidine incorporation assay.

[1142] Fibroblast and Endothelial Cell Assays

[1143] Human lung fibroblasts are obtained from Clonetics (San Diego, Calif.) and maintained in growth media from Clonetics. Dermal microvascular endothelial cells are obtained from Cell Applications (San Diego, Calif.). For proliferation assays, the human lung fibroblasts and dermal microvascular endothelial cells can be cultured at 5,000 cells/well in a 96-well plate for one day in growth medium. The cells are then incubated for one day in 0.1% BSA basal medium. After replacing the medium with fresh 0.1% BSA medium, the cells are incubated with the test proteins for 3 days. Alamar Blue (Alamar Biosciences, Sacramento, Calif.) is added to each well to a final concentration of 10%. The cells are incubated for 4 hr. Cell viability is measured by reading in a CytoFluor fluorescence reader. For the PGE₂ assays, the human lung fibroblasts are cultured at 5,000 cells/well in a 96-well plate for one day. After a medium change to 0.1% BSA basal medium, the cells are incubated with FGF-2 or agonists or antagonists of the invention with or-without IL-1α for 24 hours. The supernatants are collected and assayed for PGE₂ by EIA kit (Cayman, Ann Arbor, Mich.). For the IL-6 assays, the human lung fibroblasts are cultured at 5,000 cells/well in a 96-well plate for one day. After a medium change to 0.1% BSA basal medium, the cells are incubated with FGF-2 or with or without agonists or antagonists of the invention IL-1α for 24 hours. The supernatants are collected and assayed for IL-6 by ELISA kit (Endogen, Cambridge, Mass.).

[1144] Human lung fibroblasts are cultured with FGF-2 or agonists or antagonists of the invention for 3 days in basal medium before the addition of Alamar Blue to assess effects on growth of the fibroblasts. FGF-2 should show a stimulation at 10-2500 ng/ml which can be used to compare stimulation with agonists or antagonists of the invention.

[1145] Parkinson Models.

[1146] The loss of motor function in Parkinson's disease is attributed to a deficiency of striatal dopamine resulting from the degeneration of the nigrostriatal dopaminergic projection neurons. An animal model for Parkinson's that has been extensively characterized involves the systemic administration of 1-methyl-4 phenyl 1,2,3,6-tetrahydropyridine (MPTP). In the CNS, MPTP is taken-up by astrocytes and catabolized by monoamine oxidase B to 1-methyl-4-phenyl pyridine (MPP⁺) and released. Subsequently, MPP⁺ is actively accumulated in dopaminergic neurons by the high-affinity reuptake transporter for dopamine. MPP⁺ is then concentrated in mitochondria by the electrochemical gradient and selectively inhibits nicotidamide adenine disphosphate: ubiquinone oxidoreductionase (complex I), thereby interfering with electron transport and eventually generating oxygen radicals.

[1147] It has been demonstrated in tissue culture paradigms that FGF-2 (basic FGF) has trophic activity towards nigral dopaminergic neurons (Ferrari et al., Dev. Biol. 1989). Recently, Dr. Unsicker's group has demonstrated that administering FGF-2 in gel foam implants in the striatum results in the near complete protection of nigral dopaminergic neurons from the toxicity associated with MPTP exposure (Otto and Unsicker, J. Neuroscience, 1990).

[1148] Based on the data with FGF-2, agonists or antagonists of the invention can be evaluated to determine whether it has an action similar to that of FGF-2 in enhancing dopaminergic neuronal survival in vitro and it can also be tested in vivo for protection of dopaminergic neurons in the striatum from the damage associated with MPTP treatment. The potential effect of an agonist or antagonist of the invention is first examined in vitro in a dopaminergic neuronal cell culture paradigm. The cultures are prepared by dissecting the midbrain floor plate from gestation day 14 Wistar rat embryos. The tissue is dissociated with trypsin and seeded at a density of 200,000 cells/cm² on polyorthinine-laminin coated glass coverslips. The cells are maintained in Dulbecco's Modified Eagle's medium and F12 medium containing hormonal supplements (N1). The cultures are fixed with paraformaldehyde after 8 days in vitro and are processed for tyrosine hydroxylase, a specific marker for dopaminergic neurons, immunohistochemical staining. Dissociated cell cultures are prepared from embryonic rats. The culture medium is changed every third day and the factors are also added at that time.

[1149] Since the dopaminergic neurons are isolated from animals at gestation day 14, a developmental time which is past the stage when the dopaminergic precursor cells are proliferating, an increase in the number of tyrosine hydroxylase immunopositive neurons would represent an increase in the number of dopaminergic neurons surviving in vitro. Therefore, if an agonist or antagonist of the invention acts to prolong the survival of dopaminergic neurons, it would suggest that the agonist or antagonist may be involved in Parkinson's Disease.

[1150] The studies described in this example tested activity of agonists or antagonists of the invention. However, one skilled in the art could easily modify the exemplified studies to test the activity of polynucleotides or polypeptides of the invention (e.g., gene therapy).

### Example 25

### The Effect of Agonists or Antagonists of the Invention on the Growth of Vascular Endothelial Cells

[1151] On day 1, human umbilical vein endothelial cells (HUVEC) are seeded at 2-5×10⁴ cells/35 mm dish density in M199 medium containing 4% fetal bovine serum (FBS), 16 units/ml heparin, and 50 units/ml endothelial cell growth supplements (ECGS, Biotechnique, Inc.). On day 2, the medium is replaced with M199 containing 10% FBS, 8 units/ml heparin. An agonist or antagonist of the invention, and positive controls, such as VEGF and basic FGF (bFGF) are added, at varying concentrations. On days 4 and 6, the medium is replaced. On day 8, cell number is determined with a Coulter Counter.

[1152] An increase in the number of HUVEC cells indicates that the compound of the invention may proliferate vascular endothelial cells, while a decrease in the number of HUVEC cells indicates that the compound of the invention inhibits vascular endothelial cells.

[1153] The studies described in this example tested activity of a polypeptide of the invention. However, one skilled in the art could easily modify the exemplified studies to test the activity of polynucleotides (e.g., gene therapy), agonists, and/or antagonists of the invention.

### Example 26

### Rat Corneal Wound Healing Model

[1154] This animal model shows the effect of an agonist or antagonist of the invention on neovascularization. The experimental protocol includes:

[1155] Making a 1-1.5 mm long incision from the center of cornea into the stromal layer.

[1156] Inserting a spatula below the lip of the incision facing the outer corner of the eye.

[1157] Making a pocket (its base is 1-1.5 mm form the edge of the eye).

[1158] Positioning a pellet, containing 50 ng-5 ug of an agonist or antagonist of the invention, within the pocket.

[1159] Treatment with an agonist or antagonist of the invention can also be applied topically to the corneal wounds in a dosage range of 20 mg-500mg (daily treatment for five days).

[1160] The studies described in this example tested activity of agonists or antagonists of the invention. However, one skilled in the art could easily modify the exemplified studies to test the activity of polynucleotides or polypeptides of the invention (e.g., gene therapy).

### Example 27

### Diabetic Mouse and Glucocorticoid-Impaired Wound Healing Models

[1161] Diabetic db+/db+Mouse Model.

[1162] To demonstrate that an agonist or antagonist of the invention accelerates the healing process, the genetically diabetic mouse model of wound healing is used. The full thickness wound healing model in the db+/db+ mouse is a well characterized, clinically relevant and reproducible model of impaired wound healing. Healing of the diabetic wound is dependent on formation of granulation tissue and re-epithelialization rather than contraction (Gartner, M. H. et al., J. Surg. Res. 52:389 (1992); Greenhalgh, D. G. et al., Am. J. Pathol. 136:1235 (1990)).

[1163] The diabetic animals have many of the characteristic features observed in Type II diabetes mellitus. Homozygous (db+/db+) mice are obese in comparison to their normal heterozygous (db+/+m) littermates. Mutant diabetic (db+/db+) mice have a single autosomal recessive mutation on chromosome 4 (db+) (Coleman et al. Proc. Natl. Acad. Sci. USA 77:283-293 (1982)). Animals show polyphagia, polydipsia and polyuria. Mutant diabetic mice (db+/db+) have elevated blood glucose, increased or normal insulin levels, and suppressed cell-mediated immunity (Mandel et al., J. Immunol. 120:1375 (1978); Debray-Sachs, M. et al., Clin. Exp. Immunol. 51(1):1-7 (1983); Leiter et al., Am. J. of Pathol. 114:46-55 (1985)). Peripheral neuropathy, myocardial complications, and microvascular lesions, basement membrane thickening and glomerular filtration abnormalities have been described in these animals (Norido, F. et al., Exp. Neurol. 83(2):221-232 (1984); Robertson et al., Diabetes 29(1):60-67 (1980); Giacomelli et al., Lab Invest. 40(4):460-473 (1979); Coleman, D. L., Diabetes 31 (Suppl):1-6 (1982)). These homozygous diabetic mice develop hyperglycemia that is resistant to insulin analogous to human type II diabetes (Mandel et al., J. Immunol. 120:1375-1377 (1978)).

[1164] The characteristics observed in these animals suggests that healing in this model may be similar to the healing observed in human diabetes (Greenhalgh, et al., Am. J. of Pathol. 136:1235-1246 (1990)).

[1165] Genetically diabetic female C57BL/KsJ (db+/db+) mice and their non-diabetic (db+/+m) heterozygous littermates are used in this study (Jackson Laboratories). The animals are purchased at 6 weeks of age and are 8 weeks old at the beginning of the study. Animals are individually housed and received food and water ad libitum. All manipulations are performed using aseptic techniques. The experiments are conducted according to the rules and guidelines of Human Genome Sciences, Inc. Institutional Animal Care and Use Committee and the Guidelines for the Care and Use of Laboratory Animals.

[1166] Wounding protocol is performed according to previously reported methods (Tsuboi, R. and Rifkin, D. B., J. Exp. Med. 172:245-251 (1990)). Briefly, on the day of wounding, animals are anesthetized with an intraperitoneal injection of Avertin (0.01 mg/mL), 2,2,2-tribromoethanol and 2-methyl-2-butanol dissolved in deionized water. The dorsal region of the animal is shaved and the skin washed with 70% ethanol solution and iodine. The surgical area is dried with sterile gauze prior to wounding. An 8 mm full-thickness wound is then created using a Keyes tissue punch. Immediately following wounding, the surrounding skin is gently stretched to eliminate wound expansion. The wounds are left open for the duration of the experiment. Application of the treatment is given topically for 5 consecutive days commencing on the day of wounding. Prior to treatment, wounds are gently cleansed with sterile saline and gauze sponges.

[1167] Wounds are visually examined and photographed at a fixed distance at the day of surgery and at two day intervals thereafter. Wound closure is determined by daily measurement on days 1-5 and on day 8. Wounds are measured horizontally and vertically using a calibrated Jameson caliper. Wounds are considered healed if granulation tissue is no longer visible and the wound is covered by a continuous epithelium.

[1168] An agonist or antagonist of the invention is administered using at a range different doses, from 4 mg to 500 mg per wound per day for 8 days in vehicle. Vehicle control groups received 50 mL of vehicle solution.

[1169] Animals are euthanized on day 8 with an intraperitoneal injection of sodium pentobarbital (300 mg/kg). The wounds and surrounding skin are then harvested for histology and immunohistochemistry. Tissue specimens are placed in 10% neutral buffered formalin in tissue cassettes between biopsy sponges for further processing.

[1170] Three groups of 10 animals each (5 diabetic and 5 non-diabetic controls) are evaluated: 1) Vehicle placebo control, 2) untreated group, and 3) treated group.

[1171] Wound closure is analyzed by measuring the area in the vertical and horizontal axis and obtaining the total square area of the wound. Contraction is then estimated by establishing the differences between the initial wound area (day 0) and that of post treatment (day 8). The wound area on day 1 is 64 mm², the corresponding size of the dermal punch. Calculations are made using the following formula:

[Open area on day 8]−[Open area on day 1]/[Open area on day 1]

[1172] Specimens are fixed in 10% buffered formalin and paraffin embedded blocks are sectioned perpendicular to the wound surface (5 mm) and cut using a Reichert-Jung microtome. Routine hematoxylin-eosin (H&E) staining is performed on cross-sections of bisected wounds. Histologic examination of the wounds are used to assess whether the healing process and the morphologic appearance of the repaired skin is altered by treatment with an agonist or antagonist of the invention. This assessment included verification of the presence of cell accumulations inflammatory cells, capillaries, fibroblasts, reepithelialization and epidermal maturity (Greenhalgh, D. G. et al., Am. J. Pathol. 136:1235 (1990)). A calibrated lens micrometer is used by a blinded observer.

[1173] Tissue sections are also stained immunohistochemically with a polyclonal rabbit anti-human keratin antibody using ABC Elite detection system. Human skin is used as a positive tissue control while non-immune IgG is used as a negative control. Keratinocyte growth is determined by evaluating the extent of reepithelialization of the wound using a calibrated lens micrometer.

[1174] Proliferating cell nuclear antigen/cyclin (PCNA) in skin specimens is demonstrated by using anti-PCNA antibody (1:50) with an ABC Elite detection system. Human colon cancer served as a positive tissue control and human brain tissue is used as a negative tissue control. Each specimen included a section with omission of the primary antibody and substitution with non-immune mouse IgG. Ranking of these sections is based on the extent of proliferation on a scale of 0-8, the lower side of the scale reflecting slight proliferation to the higher side reflecting intense proliferation.

[1175] Experimental data are analyzed using an unpaired t test. A p value of <0.05 is considered significant.

[1176] Steroid Impaired Rat Model

[1177] The inhibition of wound healing by steroids has been well documented in various in vitro and in vivo systems (Wahl, Glucocorticoids and Wound healing. In: Anti-Inflammatory Steroid Action: Basic and Clinical Aspects. 280-302 (1989); Wahlet al., J. Immunol. 115: 476-481 (1975); Werb et al., J. Exp. Med. 147:1684-1694 (1978)). Glucocorticoids retard wound healing by inhibiting angiogenesis, decreasing vascular permeability (Ebert et al., An. Intern. Med. 37:701-705 (1952)), fibroblast proliferation, and collagen synthesis (Beck et al., Growth Factors. 5: 295-304 (1991); Haynes et al., J. Clin. Invest. 61: 703-797 (1978)) and producing a transient reduction of circulating monocytes (Haynes et al., J. Clin. Invest. 61: 703-797 (1978); Wahl, “Glucocorticoids and wound healing”, In: Antiinflammatory Steroid Action: Basic and Clinical Aspects, Academic Press, New York, pp. 280-302 (1989)). The systemic administration of steroids to impaired wound healing is a well establish phenomenon in rats (Beck et al., Growth Factors. 5: 295-304 (1991); Haynes et al., J. Clin. Invest. 61: 703-797 (1978); Wahl, “Glucocorticoids and wound healing”, In: Antiinflammatory Steroid Action: Basic and Clinical Aspects, Academic Press, New York, pp. 280-302 (1989); Pierce et al., Proc. Natl. Acad. Sci. USA 86: 2229-2233 (1989)).

[1178] To demonstrate that an agonist or antagonist of the invention can accelerate the healing process, the effects of multiple topical applications of the agonist or antagonist on full thickness excisional skin wounds in rats in which healing has been impaired by the systemic administration of methylprednisolone is assessed.

[1179] Young adult male Sprague Dawley rats weighing 250-300 g (Charles River Laboratories) are used in this example. The animals are purchased at 8 weeks of age and are 9 weeks old at the beginning of the study. The healing response of rats is impaired by the systemic administration of methylprednisolone (17 mg/kg/rat intramuscularly) at the time of wounding. Animals are individually housed and received food and water ad libitum. All manipulations are performed using aseptic techniques. This study is conducted according to the rules and guidelines of Human Genome Sciences, Inc. Institutional Animal Care and Use Committee and the Guidelines for the Care and Use of Laboratory Animals.

[1180] The wounding protocol is followed according to section A, above. On the day of wounding, animals are anesthetized with an intramuscular injection of ketamine (50 mg/kg) and xylazine (5 mg/kg). The dorsal region of the animal is shaved and the skin washed with 70% ethanol and iodine solutions. The surgical area is dried with sterile gauze prior to wounding. An 8 mm full-thickness wound is created using a Keyes tissue punch. The wounds are left open for the duration of the experiment. Applications of the testing materials are given topically once a day for 7 consecutive days commencing on the day of wounding and subsequent to methylprednisolone administration. Prior to treatment, wounds are gently cleansed with sterile saline and gauze sponges.

[1181] Wounds are visually examined and photographed at a fixed distance at the day of wounding and at the end of treatment. Wound closure is determined by daily measurement on days 1-5 and on day 8. Wounds are measured horizontally and vertically using a calibrated Jameson caliper. Wounds are considered healed if granulation tissue is no longer visible and the wound is covered by a continuous epithelium.

[1182] The agonist or antagonist of the invention is administered using at a range different doses, from 4 mg to 500 mg per wound per day for 8 days in vehicle. Vehicle control groups received 50 mL of vehicle solution.

[1183] Animals are euthanized on day 8 with an intraperitoneal injection of sodium pentobarbital (300 mg/kg). The wounds and surrounding skin are then harvested for histology. Tissue specimens are placed in 10% neutral buffered formalin in tissue cassettes between biopsy sponges for further processing.

[1184] Three groups of 10 animals each (5 with methylprednisolone and 5 without glucocorticoid) are evaluated: 1) Untreated group 2) Vehicle placebo control 3) treated groups.

[1185] Wound closure is analyzed by measuring the area in the vertical and horizontal axis and obtaining the total area of the wound. Closure is then estimated by establishing the differences between the initial wound area (day 0) and that of post treatment (day 8). The wound area on day I is 64 mm², the corresponding size of the dermal punch. Calculations are made using the following formula:

[Open area on day 8]−[Open area on day 1]/[Open area on day 1]

[1186] Specimens are fixed in 10% buffered formalin and paraffin embedded blocks are sectioned perpendicular to the wound surface (5 mm) and cut using an Olympus microtome. Routine hematoxylin-eosin (H&E) staining is performed on cross-sections of bisected wounds. Histologic examination of the wounds allows assessment of whether the healing process and the morphologic appearance of the repaired skin is improved by treatment with an agonist or antagonist of the invention. A calibrated lens micrometer is used by a blinded observer to determine the distance of the wound gap.

[1187] Experimental data are analyzed using an unpaired t test. A p value of <0.05 is considered significant.

[1188] The studies described in this example tested activity of agonists or antagonists of the invention. However, one skilled in the art could easily modify the exemplified studies to test the activity of polynucleotides or polypeptides of the invention (e.g., gene therapy).

### Example 28

### Lymphadema Animal Model

[1189] The purpose of this experimental approach is to create an appropriate and consistent lymphedema model for testing the therapeutic effects of an agonist or antagonist of the invention in lymphangiogenesis and re-establishment of the lymphatic circulatory system in the rat hind limb. Effectiveness is measured by swelling volume of the affected limb, quantification of the amount of lymphatic vasculature, total blood plasma protein, and histopathology. Acute lymphedema is observed for 7-10 days. Perhaps more importantly, the chronic progress of the edema is followed for up to 3-4 weeks.

[1190] Prior to beginning surgery, blood sample is drawn for protein concentration analysis. Male rats weighing approximately ˜350 g are dosed with Pentobarbital. Subsequently, the right legs are shaved from knee to hip. The shaved area is swabbed with gauze soaked in 70% EtOH. Blood is drawn for serum total protein testing. Circumference and volumetric measurements are made prior to injecting dye into paws after marking 2 measurement levels (0.5 cm above heel, at mid-pt of dorsal paw). The intradermal dorsum of both right and left paws are injected with 0.05 ml of 1% Evan's Blue. Circumference and volumetric measurements are then made following injection of dye into paws.

[1191] Using the knee joint as a landmark, a mid-leg inguinal incision is made circumferentially allowing the femoral vessels to be located. Forceps and hemostats are used to dissect and separate the skin flaps. After locating the femoral vessels, the lymphatic vessel that runs along side and underneath the vessel(s) is located. The main lymphatic vessels in this area are then electrically coagulated or suture ligated.

[1192] Using a microscope, muscles in back of the leg (near the semitendinosis and adductors) are bluntly dissected. The popliteal lymph node is then located. The 2 proximal and 2 distal lymphatic vessels and distal blood supply of the popliteal node are then ligated by suturing. The popliteal lymph node, and any accompanying adipose tissue, is then removed by cutting connective tissues.

[1193] Care is taken to control any mild bleeding resulting from this procedure. After lymphatics are occluded, the skin flaps are sealed by using liquid skin (Vetbond) (A J Buck). The separated skin edges are sealed to the underlying muscle tissue while leaving a gap of ˜0.5 cm around the leg. Skin also may be anchored by suturing to underlying muscle when necessary.

[1194] To avoid infection, animals are housed individually with mesh (no bedding). Recovering animals are checked daily through the optimal edematous peak, which typically occurred by day 5-7. The plateau edematous peak are then observed. To evaluate the intensity of the lymphedema, the circumference and volumes of 2 designated places on each paw before operation and daily for 7 days are measured. The effect of plasma proteins on lymphedema is determined and whether protein analysis is a useful testing perimeter is also investigated. The weights of both control and edematous limbs are evaluated at 2 places. Analysis is performed in a blind manner.

[1195] Circumference Measurements: Under brief gas anesthetic to prevent limb movement, a cloth tape is used to measure limb circumference. Measurements are done at the ankle bone and dorsal paw by 2 different people and those 2 readings are averaged. Readings are taken from both control and edematous limbs.

[1196] Volumetric Measurements: On the day of surgery, animals are anesthetized with Pentobarbital and are tested prior to surgery. For daily volumetrics animals are under brief halothane anesthetic (rapid immobilization and quick recovery), and both legs are shaved and equally marked using waterproof marker on legs. Legs are first dipped in water, then dipped into instrument to each marked level, then measured by Buxco edema software(Chen/Victor). Data is recorded by one person, while the other is dipping the limb to marked area.

[1197] Blood-plasma protein measurements: Blood is drawn, spun, and serum separated prior to surgery and then at conclusion for total protein and Ca2⁺ comparison.

[1198] Limb Weight Comparison: After drawing blood, the animal is prepared for tissue collection. The limbs are amputated using a quillitine, then both experimental and control legs are cut at the ligature and weighed. A second weighing is done as the tibio-cacaneal joint is disarticulated and the foot is weighed.

[1199] Histological Preparations: The transverse muscle located behind the knee (popliteal) area is dissected and arranged in a metal mold, filled with freezegel, dipped into cold methylbutane, placed into labeled sample bags at −80EC until sectioning. Upon sectioning, the muscle is observed under fluorescent microscopy for lymphatics..

[1200] The studies described in this example tested activity of agonists or antagonists of the invention. However, one skilled in the art could easily modify the exemplified studies to test the activity of polynucleotides or polypeptides of the invention (e.g., gene therapy).

### Example 29

### Suppression of TNF Alpha-induced Adhesion Molecule Expression by a Agonist or Antagonist of the Invention

[1201] The recruitment of lymphocytes to areas of inflammation and angiogenesis involves specific receptor-ligand interactions between cell surface adhesion molecules (CAMs) on lymphocytes and the vascular endothelium. The adhesion process, in both normal and pathological settings, follows a multi-step cascade that involves intercellular adhesion molecule-1 (ICAM-1), vascular cell adhesion molecule-1 (VCAM-1), and endothelial leukocyte adhesion molecule-1 (E-selectin) expression on endothelial cells (EC). The expression of these molecules and others on the vascular endothelium determines the efficiency with which leukocytes may adhere to the local vasculature and extravasate into the local tissue during the development of an inflammatory response. The local concentration of cytokines and growth factor participate in the modulation of the expression of these CAMs.

[1202] Tumor necrosis factor alpha (TNF-a), a potent proinflammatory cytokine, is a stimulator of all three CAMs on endothelial cells and may be involved in a wide variety of inflammatory responses, often resulting in a pathological outcome.

[1203] The potential of an agonist or antagonist of the invention to mediate a suppression of TNF-a induced CAM expression can be examined. A modified ELISA assay which uses ECs as a solid phase absorbent is employed to measure the amount of CAM expression on TNF-a treated ECs when co-stimulated with a member of the FGF family of proteins.

[1204] To perform the experiment, human umbilical vein endothelial cell (HUVEC) cultures are obtained from pooled cord harvests and maintained in growth medium (EGM-2; Clonetics, San Diego, Calif.) supplemented with 10% FCS and 1% penicillin/streptomycin in a 37 degree C. humidified incubator containing 5% CO₂. HUVECs are seeded in 96-well plates at concentrations of 1×10⁴ cells/well in EGM medium at 37 degree C. for 18-24 hrs or until confluent. The monolayers are subsequently washed 3 times with a serum-free solution of RPMI-1640 supplemented with 100 U/ml penicillin and 100 mg/ml streptomycin, and treated with a given cytokine and/or growth factor(s) for 24 h at 37 degree C. Following incubation, the cells are then evaluated for CAM expression.

[1205] Human Umbilical Vein Endothelial cells (HUVECs) are grown in a standard 96 well plate to confluence. Growth medium is removed from the cells and replaced with 90 ul of 199 Medium (10% FBS). Samples for testing and positive or negative controls are added to the plate in triplicate (in 10 ul volumes). Plates are incubated at 37 degree C. for either 5 h (selectin and integrin expression) or 24 h (integrin expression only). Plates are aspirated to remove medium and 100 μl of 0.1% paraformaldehyde-PBS(with Ca++ and Mg++) is added to each well. Plates are held at 4° C. for 30 min.

[1206] Fixative is then removed from the wells and wells are washed 1× with PBS(+Ca,Mg)+0.5% BSA and drained. Do not allow the wells to dry. Add 10 μl of diluted primary antibody to the test and control wells. Anti-ICAM-1-Biotin, Anti-VCAM-1-Biotin and Anti-E-selectin-Biotin are used at a concentration of 10 μg/ml (1:10 dilution of 0.1 mg/ml stock antibody). Cells are incubated at 37° C. for 30 min. in a humidified environment. Wells are washed ×3 with PBS(+Ca,Mg)+0.5% BSA.

[1207] Then add 20 μl of diluted ExtrAvidin-Alkaline Phosphotase (1:5,000 dilution) to each well and incubated at 37° C. for 30 min. Wells are washed ×3 with PBS(+Ca,Mg)+0.5% BSA. 1 tablet of p-Nitrophenol Phosphate pNPP is dissolved in 5 ml of glycine buffer (pH 10.4). 100 μl of pNPP substrate in glycine buffer is added to each test well. Standard wells in triplicate are prepared from the working dilution of the ExtrAvidin-Alkaline Phosphotase in glycine buffer: 1:5,000 (10⁰)>10^{-0.5}>10⁻¹>10⁻¹⁵0.5 μl of each dilution is added to triplicate wells and the resulting AP content in each well is 5.50 ng, 1.74 ng, 0.55 ng, 0.18 ng. 100 μl of pNNP reagent must then be added to each of the standard wells. The plate must be incubated at 37° C. for 4 h. A volume of 50 μl of 3M NaOH is added to all wells. The results are quantified on a plate reader at 405 nm. The background subtraction option is used on blank wells filled with glycine buffer only. The template is set up to indicate the concentration of AP-conjugate in each standard well [5.50 ng; 1.74 ng; 0.55 ng; 0.18 ng]. Results are indicated as amount of bound AP-conjugate in each sample.

[1208] The studies described in this example tested activity of agonists or antagonists of the invention. However, one skilled in the art could easily modify the exemplified studies to test the activity of polynucleotides or polypeptides of the invention (e.g., gene therapy).

### Example 30

### Production Of Polypeptide of the Invention For High-Throughput Screening Assays

[1209] The following protocol produces a supernatant containing polypeptide of the present invention to be tested. This supernatant can then be used in the Screening Assays described in Examples 32-41.

[1210] First, dilute Poly-D-Lysine (644 587 Boehringer-Mannheim) stock solution (1 mg/ml in PBS) 1:20 in PBS (w/o calcium or magnesium 17-516F Biowhittaker) for a working solution of 50 ug/ml. Add 200 ul of this solution to each well (24 well plates) and incubate at RT for 20 minutes. Be sure to distribute the solution over each well (note: a 12-channel pipetter may be used with tips on every other-channel). Aspirate off the Poly-D-Lysine solution and rinse with 1 ml PBS (Phosphate Buffered Saline). The PBS should remain in the well until just prior to plating the cells and plates may be poly-lysine coated in advance for up to two weeks.

[1211] Plate 293T cells (do not carry cells past P+20) at 2×10⁵ cells/well in 0.5 ml DMEM(Dulbecco's Modified Eagle Medium)(with 4.5 G/L glucose and L-glutamine (12-604F Biowhittaker))/10% heat inactivated FBS(14-503F Biowhittaker)/1× Penstrep(17-602E Biowhittaker). Let the cells grow overnight.

[1212] The next day, mix together in a sterile solution basin: 300 ul Lipofectamine (18324-012 Gibco/BRL) and 5 ml Optimem I (31985070 Gibco/BRL)/96-well plate. With a small volume multi-channel pipetter, aliquot approximately 2 ug of an expression vector containing a polynucleotide insert, produced by the methods described in Examples 8-10, into an appropriately labeled 96-well round bottom plate. With a multi-channel pipetter, add 50 ul of the Lipofectamine/Optimem I mixture to each well. Pipette up and down gently to mix. Incubate at RT 15-45 minutes. After about 20 minutes, use a multi-channel pipetter to add 150 ul Optimem I to each well. As a control, one plate of vector DNA lacking an insert should be transfected with each set of transfections.

[1213] Preferably, the transfection should be performed by tag-teaming the following tasks. By tag-teaming, hands on time is cut in half, and the cells do not spend too much time on PBS. First, person A aspirates off the media from four 24-well plates of cells, and then person B rinses each well with 0.5-1 ml PBS. Person A then aspirates off PBS rinse, and person B, using a 12-channel pipetter with tips on every other channel, adds the 200 ul of DNA/Lipofectamine/Optimem I complex to the odd wells first, then to the even wells, to each row on the 24-well plates. Incubate at 37 degree C. for 6 hours.

[1214] While cells are incubating, prepare appropriate media, either 1% BSA in DMEM with 1× penstrep, or HGS CHO-5 media (116.6 mg/L of CaCl2 (anhyd); 0.00130 mg/L CuSO₄—5H₂O; 0.050 mg/L of Fe(NO₃)₃—9H₂O; 0.417 mg/L of FeSO₄—7H₂O; 311.80 mg/L of Kcl; 28.64 mg/L of MgCl₂; 48.84 mg/L of MgSO₄; 6995.50 mg/L of NaCl; 2400.0 mg/L of NaHCO₃; 62.50 mg/L of NaH₂PO₄—H₂O; 71.02 mg/L of Na₂HPO4; 0.4320 mg/L of ZnSO₄—7H₂O; 0.002 mg/L of Arachidonic Acid ; 1.022 mg/L of Cholesterol; 0.070 mg/L of DL-alpha-Tocopherol-Acetate; 0.0520 mg/L of Linoleic Acid; 0.010 mg/L of Linolenic Acid; 0.010 mg/L of Myristic Acid; 0.010 mg/L of Oleic Acid; 0.010 mg/L of Palmitric Acid; 0.010 mg/L of Palmitic Acid; 100 mg/L of Pluronic F-68; 0.010 mg/L of Stearic Acid; 2.20 mg/L of Tween 80; 4551 mg/L of D-Glucose; 130.85 mg/ml of L-Alanine; 147.50 mg/ml of L-Arginine-HCL; 7.50 mg/ml of L-Asparagine-H₂O; 6.65 mg/ml of L-Aspartic Acid; 29.56 mg/ml of L-Cystine-2HCL—H₂O; 31.29 mg/ml of L-Cystine-2HCL; 7.35 mg/ml of L-Glutamic Acid; 365.0 mg/ml of L-Glutamine; 18.75 mg/ml of Glycine; 52.48 mg/ml of L-Histidine-HCL—H₂O; 106.97 mg/ml of L-Isoleucine; 111.45 mg/ml of L-Leucine; 163.75 mg/ml of L-Lysine HCL; 32.34 mg/ml of L-Methionine; 68.48 mg/ml of L-Phenylalainine; 40.0 mg/ml of L-Proline; 26.25 mg/ml of L-Serine; 101.05 mg/ml of L-Threonine; 19.22 mg/ml of L-Tryptophan; 91.79 mg/ml of L-Tryrosine-2Na—2H₂O; and 99.65 mg/ml of L-Valine; 0.0035 mg/L of Biotin; 3.24 mg/L of D-Ca Pantothenate; 11.78 mg/L of Choline Chloride; 4.65 mg/L of Folic Acid; 15.60 mg/L of i-Inositol; 3.02 mg/L of Niacinamide; 3.00 mg/L of Pyridoxal HCL; 0.031 mg/L of Pyridoxine HCL; 0.319 mg/L of Riboflavin; 3.17 mg/L of Thiamine HCL; 0.365 mg/L of Thymidine; 0.680 mg/L of Vitamin B₁₂; 25 mM of HEPES Buffer; 2.39 mg/L of Na Hypoxanthine; 0.105 mg/L of Lipoic Acid; 0.081 mg/L of Sodium Putrescine-2HCL; 55.0 mg/L of Sodium Pyruvate; 0.0067 mg/L of Sodium Selenite; 20 uM of Ethanolamine; 0.122 mg/L of Ferric Citrate; 41.70 mg/L of Methyl-B-Cyclodextrin complexed with Linoleic Acid; 33.33 mg/L of Methyl-B-Cyclodextrin complexed with Oleic Acid; 10 mg/L of Methyl-B-Cyclodextrin comptexed with Retinal Acetate. Adjust osmolarity to 327 mOsm) with 2 mm glutamine and 1× penstrep. (BSA (81-068-3 Bayer) 100 gm dissolved in 1L DMEM for a 10% BSA stock solution). Filter the media and collect 50 ul for endotoxin assay in 15 ml polystyrene conical.

[1215] The transfection reaction is terminated, preferably by tag-teaming, at the end of the incubation period. Person A aspirates off the transfection media, while person B adds 1.5 ml appropriate media to each well. Incubate at 37 degree C. for 45 or 72 hours depending on the media used: 1% BSA for 45 hours or CHO-5 for 72 hours.

[1216] On day four, using a 300 ul multichannel pipetter, aliquot 600 ul in one 1 ml deep well plate and the remaining supernatant into a 2 ml deep well. The supernatants from each well can then be used in the assays described in Examples 32-39.

[1217] It is specifically understood that when activity is obtained in any of the assays described below using a supernatant, the activity originates from either the polypeptide of the present invention directly (e.g., as a secreted protein) or by polypeptide of the present invention inducing expression of other proteins, which are then secreted into the supernatant. Thus, the invention further provides a method of identifying the protein in the supernatant characterized by an activity in a particular assay.

### Example 31

### Construction of GAS Reporter Construct

[1218] One signal transduction pathway involved in the differentiation and proliferation of cells is called the Jaks-STATs pathway. Activated proteins in the Jaks-STATs pathway bind to gamma activation site “GAS” elements or interferon-sensitive responsive element (“ISRE”), located in the promoter of many genes. The binding of a protein to these elements alter the expression of the associated gene.

[1219] GAS and ISRE elements are recognized by a class of transcription factors called Signal Transducers and Activators of Transcription, or “STATs.” There are six members of the STATs family. Stat1 and Stat3 are present in many cell types, as is Stat2 (as response to IFN-alpha is widespread). Stat4 is more restricted and is not in many cell types though it has been found in T helper class I, cells after treatment with IL-12. Stat5 was originally called mammary growth factor, but has been found at higher concentrations in other cells including myeloid cells. It can be activated in tissue culture cells by many cytokines.

[1220] The STATs are activated to translocate from the cytoplasm to the nucleus upon tyrosine phosphorylation by a set of kinases known as the Janus Kinase (“Jaks”) family. Jaks represent a distinct family of soluble tyrosine kinases and include Tyk2, Jak1, Jak2, and Jak3. These kinases display significant sequence similarity and are generally catalytically inactive in resting cells.

[1221] The Jaks are activated by a wide range of receptors summarized in the Table below. (Adapted from review by Schidler and Dalnell, Ann. Rev. Biochem. 64:621-51 (1995).) A cytokine receptor family, capable of activating Jaks, is divided into two groups: (a) Class 1 includes receptors for IL-2, IL-3, IL-4, IL-6, IL-7, IL-9, IL-11, IL-12, IL-15, Epo, PRL, GH, G-CSF, GM-CSF, LIF, CNTF, and thrombopoietin; and (b) Class 2 includes IFN-a, IFN-g, and IL-10. The Class 1 receptors share a conserved cysteine motif (a set of four conserved cysteines and one tryptophan) and a WSXWS motif (a membrane proximal region encoding Trp-Ser-Xaa-Trp-Ser(SEQ ID NO: 2)).

[1222] Thus, on binding of a ligand to a receptor, Jaks are activated, which in turn activate STATs, which then translocate and bind to GAS elements. This entire process is encompassed in the Jaks-STATs signal transduction pathway.

[1223] Therefore, activation of the Jaks-STATs pathway, reflected by the binding of the GAS or the ISRE element, can be used to indicate proteins involved in the proliferation and differentiation of cells. For example, growth factors and cytokines are known to activate the Jaks-STATs pathway. (See Table below.) Thus, by using GAS elements linked to reporter molecules, activators of the Jaks-STATs pathway can be identified.

| | | JAKs | | | | |
|---|---|---|---|---|---|---|
| Ligand | tyk2 | Jak1 | Jak2 | Jak3 | STATS | GAS (elements) or ISRE |
| IFN family | | | | | | |
| IFN-a/B | + | + | − | − | 1, 2, 3 | ISRE |
| IFN-g | | + | + | − | 1 | GAS (IRF1 > Lys6 > IFP) |
| Il-10 | + | ? | ? | − | 1, 3 | |
| gp130 family | | | | | | |
| IL-6 (Pleiotropic)+ | + | + | ? | | 1, 3 | GAS (IRF1 > Lys6 > IFP) |
| Il-11(Pleiotropic)? | + | ? | ? | | 1, 3 | |
| OnM(Pleiotropic)? | + | + | ? | | 1, 3 | |
| LIF(Pleiotropic)? | + | + | ? | | 1, 3 | |
| CNTF(Pleiotropic) | −/+ | + | + | ? | 1, 3 | |
| G-CSF(Pleiotropic) | ? | + | ? | ? | 1, 3 | |
| IL-12(Pleiotropic) | + | − | + | + | 1, 3 | |
| g-C family | | | | | | |
| IL-2 (lymphocytes) | − | + | − | + | 1, 3, 5 | GAS |
| IL-4 (lymph/myeloid) | − | + | − | + | 6 | GAS (IRF1 = IFP >> Ly6)(IgH) |
| IL-7 (lymphocytes) | − | + | − | + | 5 | GAS |
| IL-9 (lymphocytes) | − | + | − | + | 5 | GAS |
| IL-13 (lymphocyte) | − | + | ? | ? | 6 | GAS |
| IL-15 | ? | + | ? | + | 5 | GAS |
| gp140 family | | | | | | |
| IL-3 (myeloid) | − | − | + | − | 5 | GAS (IRF1 > IFP >> Ly6) |
| IL-5 (myeloid) | − | − | + | − | 5 | GAS |
| GM-CSF (myeloid) | − | − | + | − | 5 | GAS |
| Growth hormone family | | | | | | |
| GH | ? | − | + | − | 5 | |
| PRL | ? | +/− | + | − | 1, 3, 5 | |
| EPO | ? | − | + | − | 5 | GAS (B-CAS > IRF1 = IFP >> Ly6) |
| Receptor Tyrosine Kinases | | | | | | |
| EGF | ? | + | + | − | 1, 3 | GAS (IRF1) |
| PDGF | ? | + | + | − | 1, 3 | |
| CSF-1 | ? | + | + | − | 1, 3 | GAS (not IRF1) |

[1224] To construct a synthetic GAS containing promoter element, which is used in the Biological Assays described in Examples 32-33, a PCR based strategy is employed to generate a GAS-SV40 promoter sequence. The 5′ primer contains four tandem copies of the GAS binding site found in the IRF1 promoter and previously demonstrated to bind STATs upon induction with a range of cytokines (Rothman et al., Immunity 1:457-468 (1994).), although other GAS or ISRE elements can be used instead. The 5′ primer also contains 18 bp of sequence complementary to the SV40 early promoter sequence and is flanked with an XhoI site. The sequence of the 5′ primer is:

| | |
|---|---|
| 5′:GCGCCTCGAGATTTCCCCGAAATCTAGATTTCCCCGAAATGATTTCCCCG | (SEQ ID NO: 3) |
| AAATGATTTCCCCGAAATATCTGCCATCTCAATTAG:3′ | |

[1225] The downstream primer is complementary to the SV40 promoter and is flanked with a Hind III site: 5′:GCGGCAAGCTTTTTGCAAAGCCTAGGC:3′ (SEQ ID NO: 4)

[1226] PCR amplification is performed using the SV40 promoter template present in the B-gal:promoter plasmid obtained from Clontech. The resulting PCR fragment is digested with XhoI/Hind III and subcloned into BLSK2-. (Stratagene.) Sequencing with forward and reverse primers confirms that the insert contains the following sequence:

| | |
|---|---|
| 5′:CTCGAGATTTCCCCGAAATCTAGATTTCCCCGAAATGATTTCCCCGAAAT | (SEQ ID NO: 5) |
| GATTTCCCCGAAATATCTGCCATCTCAATTAGTCAGCAACCATAGTCCCGC | |
| CCCTAACTCCGCCCATCCCGCCCCTAACTCCGCCCAGTTCCGCCCATTCTCC | |
| GCCCCATGGCTGACTAATTTTTTTTATTTATGCAGAGGCCGAGGCCGCCTC | |
| GGCCTCTGAGCTATTCCAGAAGTAGTGAGGAGGCTTTTTTGGAGGCCTAGG | |
| CTTTTGCAAAAAGCTT:3′ | |

[1227] With this GAS promoter element linked to the SV40 promoter, a GAS:SEAP2 reporter construct is next engineered. Here, the reporter molecule is a secreted alkaline phosphatase, or “SEAP.” Clearly, however, any reporter molecule can be used instead of SEAP, in this or in any of the other Examples. Well known reporter molecules that can be used instead of SEAP include chloramphenicol acetyltransferase (CAT), luciferase, alkaline phosphatase, B-galactosidase, green fluorescent protein (GFP), or any protein detectable by an antibody.

[1228] The above sequence confirmed synthetic GAS-SV40 promoter element is subcloned into the pSEAP-Promoter vector obtained from Clontech using HindIII and XhoI, effectively replacing the SV40 promoter with the amplified GAS:SV40 promoter element, to create the GAS-SEAP vector. However, this vector does not contain a neomycin resistance gene, and therefore, is not preferred for mammalian expression systems.

[1229] Thus, in order to generate mammalian stable cell lines expressing the GAS-SEAP reporter, the GAS-SEAP cassette is removed from the GAS-SEAP vector using SalI and NotI, and inserted into a backbone vector containing the neomycin resistance gene, such as pGFP-1 (Clontech), using these restriction sites in the multiple cloning site, to create the GAS-SEAP/Neo vector. Once this vector is transfected into mammalian cells, this vector can then be used as a reporter molecule for GAS binding as described in Examples 32-33.

[1230] Other constructs can be made using the above description and replacing GAS with a different promoter sequence. For example, construction of reporter molecules containing NFK-B and EGR promoter sequences are described in Examples 34 and 35. However, many other promoters can be substituted using the protocols described in these Examples. For instance, SRE, IL-2, NFAT, or Osteocalcin promoters can be substituted, alone or in combination (e.g., GAS/NF-KB/EGR, GAS/NF-KB, Il-2/NFAT, or NF-KB/GAS). Similarly, other cell lines can be used to test reporter construct activity, such as HELA (epithelial), HUVEC (endothelial), Reh (B-cell), Saos-2 (osteoblast), HUVAC (aortic), or Cardiomyocyte.

### Example 32

### High-Throughput Screening Assay for T-cell Activity

[1231] The following protocol is used to assess T-cell activity by identifying factors, and determining whether supemate containing a polypeptide of the invention proliferates and/or differentiates T-cells. T-cell activity is assessed using the GAS/SEAP/Neo construct produced in Example 31. Thus, factors that increase SEAP activity indicate the ability to activate the Jaks-STATS signal transduction pathway. The T-cell used in this assay is Jurkat T-cells (ATCC Accession No. TIB-152), although Molt-3 cells (ATCC Accession No. CRL-1552) and Molt-4 cells (ATCC Accession No. CRL-1582) cells can also be used.

[1232] Jurkat T-cells are lymphoblastic CD4+ Th1 helper cells. In order to generate stable cell lines, approximately 2 million Jurkat cells are transfected with the GAS-SEAP/neo vector using DMRIE-C (Life Technologies)(transfection procedure described below). The transfected cells are seeded to a density of approximately 20,000 cells per well and transfectants resistant to 1 mg/ml genticin selected. Resistant colonies are expanded and then tested for their response to increasing concentrations of interferon gamma. The dose response of a selected clone is demonstrated.

[1233] Specifically, the following protocol will yield sufficient cells for 75 wells containing 200 ul of cells. Thus, it is either scaled up, or performed in multiple to generate sufficient cells for multiple 96 well plates. Jurkat cells are maintained in RPMI+10% serum with 1% Pen-Strep. Combine 2.5 mls of OPTI-MEM (Life Technologies) with 10 ug of plasmid DNA in a T25 flask. Add 2.5 ml OPTI-MEM containing 50 ul of DMRIE-C and incubate at room temperature for 15-45 mins.

[1234] During the incubation period, count cell concentration, spin down the required number of cells (10⁷ per transfection), and resuspend in OPTI-MEM to a final concentration of 10⁷ cells/ml. Then add 1 ml of 1×10⁷ cells in OPTI-MEM to T25 flask and incubate at 37 degree C. for 6 hrs. After the incubation, add 10 ml of RPMI+15% serum.

[1235] The Jurkat:GAS-SEAP stable reporter lines are maintained in RPMI+10% serum, 1 mg/ml Genticin, and 1% Pen-Strep. These cells are treated with supernatants containing polypeptide of the present invention or polypeptide of the present invention induced polypeptides as produced by the protocol described in Example 30.

[1236] On the day of treatment with the supernatant, the cells should be washed and resuspended in fresh RPMI+10% serum to a density of 500,000 cells per ml. The exact number of cells required will depend on the number of supernatants being screened. For one 96 well plate, approximately 10 million cells (for 10 plates, 100 million cells) are required.

[1237] Transfer the cells to a triangular reservoir boat, in order to dispense the cells into a 96 well dish, using a 12 channel pipette. Using a 12 channel pipette, transfer 200 ul of cells into each well (therefore adding 100, 000 cells per well).

[1238] After all the plates have been seeded, 50 ul of the supernatants are transferred directly from the 96 well plate containing the supernatants into each well using a 12 channel pipette. In addition, a dose of exogenous interferon gamma (0.1, 1.0, 10 ng) is added to wells H9, H10, and H11 to serve as additional positive controls for the assay.

[1239] The 96 well dishes containing Jurkat cells treated with supernatants are placed in an incubator for 48 hrs (note: this time is variable between 48-72 hrs). 35 ul samples from each well are then transferred to an opaque 96 well plate using a 12 channel pipette. The opaque plates should be covered (using sellophene covers) and stored at −20 degree C. until SEAP assays are performed according to Example 36. The plates containing the remaining treated cells are placed at 4 degree C. and serve as a source of material for repeating the assay on a specific well if desired.

[1240] As a positive control, 100 Unit/ml interferon gamma can be used which is known to activate Jurkat T cells. Over 30 fold induction is typically observed in the positive control wells.

[1241] The above protocol may be used in the generation of both transient, as well as stable, transfected cells, which would be apparent to those of skill in the art.

### Example 33

### High-Throughput Screening Assay Identifying Myeloid Activity

[1242] The following protocol is used to assess myeloid activity of polypeptide of the present invention by determining whether polypeptide of the present invention proliferates and/or differentiates myeloid cells. Myeloid cell activity is assessed using the GAS/SEAP/Neo construct produced in Example 31. Thus, factors that increase SEAP activity indicate the ability to activate the Jaks-STATS signal transduction pathway. The myeloid cell used in this assay is U937, a pre-monocyte cell line, although TF-1, HL60, or KG1 can be used.

[1243] To transiently transfect U937 cells with the GAS/SEAP/Neo construct produced in Example 31, a DEAE-Dextran method (Kharbanda et. al., 1994, Cell Growth & Differentiation, 5:259-265) is used. First, harvest 2×10⁷ U937 cells and wash with PBS. The U937 cells are usually grown in RPMI 1640 medium containing 10% heat-inactivated fetal bovine serum (FBS) supplemented with 100 units/ml penicillin and 100 mg/ml streptomycin.

[1244] Next, suspend the cells in 1 ml of 20 mM Tris-HCl (pH 7.4) buffer containing 0.5 mg/ml DEAE-Dextran, 8 ug GAS-SEAP2 plasmid DNA, 140 mM NaCl, 5 mM KCl, 375 uM Na₂HPO₄.7H₂O, 1 mM MgCl₂, and 675 uM CaCl₂. Incubate at 37 degrees C. for 45 min.

[1245] Wash the cells with RPMI 1640 medium containing 10% FBS and then resuspend in 10 ml complete medium and incubate at 37 degree C. for 36 hr.

[1246] The GAS-SEAP/U937 stable cells are obtained by growing the cells in 400 ug/ml G418. The G418-free medium is used for routine growth but every one to two months, the cells should be re-grown in 400 ug/ml G418 for couple of passages.

[1247] These cells are tested by harvesting 1×10⁸ cells (this is enough for ten 96-well plates assay) and wash with PBS. Suspend the cells in 200 ml above described growth medium, with a final density of 5×10⁵ cells/ml. Plate 200 ul cells per well in the 96-well plate (or 1×10⁵ cells/well).

[1248] Add 50 ul of the supernatant prepared by the protocol described in Example 30. Incubate at 37 degee C. for 48 to 72 hr. As a positive control, 100 Unit/ml interferon gamma can be used which is known to activate U937 cells. Over 30 fold induction is typically observed in the positive control wells. SEAP assay the supernatant according to the protocol described in Example 36.

### Example 34

### High-Throughput Screening Assay Identifying Neuronal Activity

[1249] When cells undergo differentiation and proliferation, a group of genes are activated through many different signal transduction pathways. One of these genes, EGR1 (early growth response gene 1), is induced in various tissues and cell types upon activation. The promoter of EGR1 is responsible for such induction. Using the EGR1 promoter linked to reporter molecules, activation of cells can be assessed by polypeptide of the present invention.

[1250] Particularly, the following protocol is used to assess neuronal activity in PC12 cell lines. PC12 cells (rat phenochromocytoma cells) are known to proliferate and/or differentiate by activation with a number of mitogens, such as TPA (tetradecanoyl phorbol acetate), NGF (nerve growth factor), and EGF (epidermal growth factor). The EGR1 gene expression is activated during this treatment. Thus, by stably transfecting PC12 cells with a construct containing an EGR promoter linked SEAP reporter, activation of PC12 cells by polypeptide of the present invention can be assessed.

[1251] The EGR/SEAP reporter construct can be assembled by the following protocol. The EGR-1 promoter sequence (−633 to +1)(Sakamoto K et al., Oncogene 6:867-871 (1991)) can be PCR amplified from human genomic DNA using the following primers:

(SEQ ID NO: 6)

5′ GCGCTCGAGGGATGACAGCGATAGAACCCCGG-3′

(SEQ ID NO: 7)

5′ GCGAAGCTTCGCGACTCCCCGGATCCGCCTC-3′

[1252] Using the GAS:SEAP/Neo vector produced in Example 31, EGR1 amplified product can then be inserted into this vector. Linearize the GAS:SEAP/Neo vector using restriction enzymes XhoI/HindIII, removing the GAS/SV40 stuffer. Restrict the EGR1 amplified product with these same enzymes. Ligate the vector and EGR1 promoter.

[1253] To prepare 96 well-plates for cell culture, two mls of a coating solution (1:30 dilution of collagen type-I (Upstate Biotech Inc. Cat#08-115) in 30% ethanol (filter sterilized)) is added per one 10 cm plate or 50 ml per well of the 96-well plate, and allowed to air dry for 2 hr.

[1254] PC12 cells are routinely grown in RPMI-1640 medium (Bio Whittaker) ining 10% horse serum (JRH BIOSCIENCES, Cat. # 12449-78P), 5% heat-inactivated fetal bovine serum (FBS) supplemented with 100 units/ml penicillin and 100 ug/ml streptomycin on a precoated 10 cm tissue culture dish. One to four split is done every three to four days. Cells are removed from the plates by scraping and resuspended with pipetting up and down for more than 15 times.

[1255] Transfect the EGR/SEAP/Neo construct into PC12 using the Lipofectamine protocol described in Example 30. EGR-SEAP/PC12 stable cells are obtained by growing the cells in 300 ug/ml G418. The G418-free medium is used for routine growth but every one to two months, the cells should be re-grown in 300 ug/ml G418 for couple of passages.

[1256] To assay for neuronal activity, a 10 cm plate with cells around 70 to 80% confluent is screened by removing the old medium. Wash the cells once with PBS (Phosphate buffered saline). Then starve the cells in low serum medium (RPMI-1640 containing 1% horse serum and 0.5% FBS with antibiotics) overnight.

[1257] The next morning, remove the medium and wash the cells with PBS. Scrape off the cells from the plate, suspend the cells well in 2 ml low serum medium. Count the cell number and add more low serum medium to reach final cell density as 5×10⁵ cells/ml.

[1258] Add 200 ul of the cell suspension to each well of 96-well plate (equivalent to 1×10⁵ cells/well). Add 50 ul supernatant produced by Example 30, 37 degree C. for 48 to 72 hr. As a positive control, a growth factor known to activate PC12 cells through EGR can be used, such as 50 ng/ul of Neuronal Growth Factor (NGF). Over fifty-fold induction of SEAP is typically seen in the positive control wells. SEAP assay the supernatant according to Example 36.

### Example 35

### High-Throughput Screening Assay for T-cell Activity

[1259] NF-KB (Nuclear Factor KB) is a transcription factor activated by a wide variety of agents including the inflammatory cytokines IL-1 and TNF, CD30 and CD40, lymphotoxin-alpha and lymphotoxin-beta, by exposure to LPS or thrombin, and by expression of certain viral gene products. As a transcription factor, NF-KB regulates the expression of genes involved in immune cell activation, control of apoptosis (NF-KB appears to shield cells from apoptosis), B and T-cell development, anti-viral and antimicrobial responses, and multiple stress responses.

[1260] In non-stimulated conditions, NF-KB is retained in the cytoplasm with I-KB (Inhibitor KB). However, upon stimulation, I-KB is phosphorylated and degraded, causing NF-KB to shuttle to the nucleus, thereby activating transcription of target genes. Target genes activated by NF-KB include IL-2, IL-6, GM-CSF, ICAM-1 and class 1 MHC.

[1261] Due to its central role and ability to respond to a range of stimuli, reporter constructs utilizing the NF-KB promoter element are used to screen the supernatants produced in Example 30. Activators or inhibitors of NF-KB would be useful in treating, preventing, and/or diagnosing diseases. For example, inhibitors of NF-KB could be used to treat those diseases related to the acute or chronic activation of NF-KB, such as rheumatoid arthritis.

[1262] To construct a vector containing the NF-KB promoter element, a PCR. based strategy is employed. The upstream primer contains four tandem copies of the NF-KB binding site (GGGGACTTTCCC) (SEQ ID NO: 8), 18 bp of sequence complementary to the 5′ end of the SV40 early promoter sequence, and is flanked with an XhoI site:

| | |
|---|---|
| 5′:GCGGCCTCGAGGGGACTTTCCCGGGGACTTTCCGGGGACTTTCCGGGAC | (SEQ ID NO: 9) |
| TTTCCATCCTGCCATCTCAATTAG:3′ | |

[1263] The downstream primer is complementary to the 3′ end of the SV40 promoter and is flanked with a Hind III site:

[1264] 5′:GCGGCAAGCTTTTTGCAAAGCCTAGGC:3′ (SEQ ID NO: 4)

[1265] PCR amplification is performed using the SV40 promoter template present in the pB-gal:promoter plasmid obtained from Clontech. The resulting PCR fragment is digested with XhoI and Hind III and subcloned into BLSK2-. (Stratagene) Sequencing with the T7 and T3 primers confirms the insert contains the following sequence:

(SEQ ID NO: 10)

5′:CTCGAGGGGACTTTCCCGGGGACTTTCCGGGGACTTTCCGGGACTTT
CCATCTGCCATCTCAATTAGTCAGCAACCATAGTCCCGCCCCTAACTCCG
CCCATCCCGCCCCTAACTCCGCCCAGTTCCGCCCATTCTCCGCCCCATGG
CTGACTAATTTTTTTTATTTATGCAGAGGCCGAGGCCGCCTCGGCCTCTG
AGCTATTCCAGAAGTAGTGAGGAGGCTTTTTTGGAGGCCTAGGCTTTTGC
AAAAAGCTT:3′

[1266] Next, replace the SV40 minimal promoter element present in the pSEAP2-promoter plasmid (Clontech) with this NF-KB/SV40 fragment using XhoI and HindIII. However, this vector does not contain a neomycin resistance gene, and therefore, is not preferred for mammalian expression systems.

[1267] In order to generate stable mammalian cell lines, the NF-KB/SV40/SEAP cassette is removed from the above NF-KB/SEAP vector using restriction enzymes SalI and NotI, and inserted into a vector containing neomycin resistance. Particularly, the NF-KB/SV40/SEAP cassette was inserted into pGFP-1 (Clontech), replacing the GFP gene, after restricting pGFP-1 with SalI and NotI.

[1268] Once NF-KB/SV40/SEAP/Neo vector is created, stable Jurkat T-cells are created and maintained according to the protocol described in Example 32. Similarly, the method for assaying supematants with these stable Jurkat T-cells is also described in Example 32. As a positive control, exogenous TNF alpha (0.1,1, 10 ng) is added to wells H9, H10, and H11, with a 5-10 fold activation typically observed.

### Example 36

### Assay for SEAP Activity

[1269] As a reporter molecule for the assays described in Examples 32-35, SEAP activity is assayed using the Tropix Phospho-light Kit (Cat. BP-400) according to the following general procedure. The Tropix Phospho-light Kit supplies the Dilution, Assay, and Reaction Buffers used below.

[1270] Prime a dispenser with the 2.5×Dilution Buffer and dispense 15 ul of 2.5×dilution buffer into Optiplates containing 35 ul of a supernatant. Seal the plates with a plastic sealer and incubate at 65 degree C. for 30 min. Separate the Optiplates to avoid uneven heating.

[1271] Cool the samples to room temperature for 15 minutes. Empty the dispenser and prime with the Assay Buffer. Add 50 ml Assay Buffer and incubate at room temperature 5 min. Empty the dispenser and prime with the Reaction Buffer (see the Table below). Add 50 ul Reaction Buffer and incubate at room temperature for 20 minutes. Since the intensity of the chemiluminescent signal is time dependent, and it takes about 10 minutes to read 5 plates on a luminometer, thus one should treat 5 plates at each time and start the second set 10 minutes later.

[1272] Read the relative light unit in the luminometer. Set H12 as blank, and print the results. An increase in chemiluminescence indicates reporter activity.

Reaction Buffer Formulation:

| # of plates | Rxn buffer diluent (ml) | CSPD (ml) |
|---|---|---|
| 10 | 60 | 3 |
| 11 | 65 | 3.25 |
| 12 | 70 | 3.5 |
| 13 | 75 | 3.75 |
| 14 | 80 | 4 |
| 15 | 85 | 4.25 |
| 16 | 90 | 4.5 |
| 17 | 95 | 4.75 |
| 18 | 100 | 5 |
| 19 | 105 | 5.25 |
| 20 | 110 | 5.5 |
| 21 | 115 | 5.75 |
| 22 | 120 | 6 |
| 23 | 125 | 6.25 |
| 24 | 130 | 6.5 |
| 25 | 135 | 6.75 |
| 26 | 140 | 7 |
| 27 | 145 | 7.25 |
| 28 | 150 | 7.5 |
| 29 | 155 | 7.75 |
| 30 | 160 | 8 |
| 31 | 165 | 8.25 |
| 32 | 170 | 8.5 |
| 33 | 175 | 8.75 |
| 34 | 180 | 9 |
| 35 | 185 | 9.25 |
| 36 | 190 | 9.5 |
| 37 | 195 | 9.75 |
| 38 | 200 | 10 |
| 39 | 205 | 10.25 |
| 40 | 210 | 10.5 |
| 41 | 215 | 10.75 |
| 42 | 220 | 11 |
| 43 | 225 | 11.25 |
| 44 | 230 | 11.5 |
| 45 | 235 | 11.75 |
| 46 | 240 | 12 |
| 47 | 245 | 12.25 |
| 48 | 250 | 12.5 |
| 49 | 255 | 12.75 |
| 50 | 260 | 13 |

### Example 37

### High-Throughput Screening Assay Identifying Changes in Small Molecule Concentration and Membrane Permeability

[1273] Binding of a ligand to a receptor is known to alter intracellular levels of small molecules, such as calcium, potassium, sodium, and pH, as well as alter membrane potential. These alterations can be measured in an assay to identify supernatants which bind to receptors of a particular cell. Although the following protocol describes an assay for calcium, this protocol can easily be modified to detect changes in potassium, sodium, pH, membrane potential, or any other small molecule which is detectable by a fluorescent probe.

[1274] The following assay uses Fluorometric Imaging Plate Reader (“FLIPR”) to measure changes in fluorescent molecules (Molecular Probes) that bind small molecules. Clearly, any fluorescent molecule detecting a small molecule can be used instead of the calcium fluorescent molecule, fluo-4 (Molecular Probes, Inc.; catalog no. F-14202), used here.

[1275] For adherent cells, seed the cells at 10,000-20,000 cells/well in a Co-star black 96-well plate with clear bottom. The plate is incubated in a CO₂ incubator for 20 hours. The adherent cells are washed two times in Biotek washer with 200 ul of HBSS (Hank's Balanced Salt Solution) leaving 100 ul of buffer after the final wash.

[1276] A stock solution of 1 mg/ml fluo-4 is made in 10% pluronic acid DMSO. To load the cells with fluo-4 , 50 ul of 12 ug/ml fluo-4 is added to each well. The plate is incubated at 37 degrees C. in a CO₂ incubator for 60 min. The plate is washed four times in the Biotek washer with HBSS leaving 100 ul of buffer.

[1277] For non-adherent cells, the cells are spun down from culture media. Cells are re-suspended to 2-5×10⁶ cells/ml with HBSS in a 50-ml conical tube. 4 ul of 1 mg/ml fluo-4 solution in 10% pluronic acid DMSO is added to each ml of cell suspension. The tube is then placed in a 37 degrees C. water bath for 30-60 min. The cells are washed twice with HBSS, resuspended to1×10⁶ cells/ml, and dispensed into a microplate, 100 ul/well. The plate is centrifuged at 1000 rpm for 5 min. The plate is then washed once in Denley Cell Wash with 200 ul, followed by an aspiration step to 100 ul final volume.

[1278] For a non-cell based assay, each well contains a fluorescent molecule, such as fluo-4 . The supernatant is added to the well, and a change in fluorescence is detected.

[1279] To measure the fluorescence of intracellular calcium, the FLIPR is set for the following parameters: (1) System gain is 300-800 mW; (2) Exposure time is 0.4 second; (3) Camera F/stop is F/2; (4) Excitation is 488 nm; (5) Emission is 530 nm; and (6) Sample addition is 50 ul. Increased emission at 530 nm indicates an extracellular signaling event caused by the a molecule, either polypeptide of the present invention or a molecule induced by polypeptide of the present invention, which has resulted in an increase in the intracellular Ca⁺⁺ concentration.

### Example 38

### High-Throughput Screening Assay Identifying Tyrosine Kinase Activity

[1280] The Protein Tyrosine Kinases (PTK) represent a diverse group of transmembrane and cytoplasmic kinases. Within the Receptor Protein Tyrosine Kinase RPTK) group are receptors for a range of mitogenic and metabolic growth factors including the PDGF, FGF, EGF, NGF, HGF and Insulin receptor subfamilies. In addition there are a large family of RPTKs for which the corresponding ligand is unknown. Ligands for RPTKs include mainly secreted small proteins, but also membrane-bound and extracellular matrix proteins.

[1281] Activation of RPTK by ligands involves ligand-mediated receptor dimerization, resulting in transphosphorylation of the receptor subunits and activation of the cytoplasmic tyrosine kinases. The cytoplasmic tyrosine kinases include receptor associated tyrosine kinases of the src-family (e.g., src, yes, lck, lyn, fyn) and non-receptor linked and cytosolic protein tyrosine kinases, such as the Jak family, members of which mediate signal transduction triggered by the cytokine superfamily of receptors (e.g., the Interleukins, Interferons, GM-CSF, and Leptin).

[1282] Because of the wide range of known factors capable of stimulating tyrosine kinase activity, identifying whether polypeptide of the present invention or a molecule induced by polypeptide of the present invention is capable of activating tyrosine kinase signal transduction pathways is of interest. Therefore, the following protocol is designed to identify such molecules capable of activating the tyrosine kinase signal transduction pathways.

[1283] Seed target cells (e.g., primary keratinocytes) at a density of approximately 25,000 cells per well in a 96 well Loprodyne Silent Screen Plates purchased from Nalge Nunc (Naperville, Ill.). The plates are sterilized with two 30 minute rinses with 100% ethanol, rinsed with water and dried overnight. Some plates are coated for 2 hr with 100 ml of cell culture grade type I collagen (50 mg/ml), gelatin (2% ) or polylysine (50 mg/ml), all of which can be purchased from Sigma Chemicals (St. Louis, Mo.) or 10% Matrigel purchased from Becton Dickinson (Bedford,Mass.), or calf serum, rinsed with PBS and stored at 4 degree C. Cell growth on these plates is assayed by seeding 5,000 cells/well in growth medium and indirect quantitation of cell number through use of alamarBlue as described by the manufacturer Alamar Biosciences, Inc. (Sacramento, Calif.) after 48 hr. Falcon plate covers #3071 from Becton Dickinson (Bedford,Mass.) are used to cover the Loprodyne Silent Screen Plates. Falcon Microtest III cell culture plates can also be used in some proliferation experiments.

[1284] To prepare extracts, A431 cells are seeded onto the nylon membranes of Loprodyne plates (20,000/200 ml/well) and cultured overnight in complete medium. Cells are quiesced by incubation in serum-free basal medium for 24 hr. After 5-20 minutes treatment with EGF (60 ng/ml) or 50 ul of the supernatant produced in Example 30, the medium was removed and 100 ml of extraction buffer ((20 mM HEPES pH 7.5, 0.15 M NaCl, 1% Triton X-100, 0.1% SDS, 2 mM Na3VO4, 2 mM Na4P207 and a cocktail of protease inhibitors (# 1836170) obtained from Boeheringer Mannheim (Indianapolis, Ind.)) is added to each well and the plate is shaken on a rotating shaker for 5 minutes at 4° C. The plate is then placed in a vacuum transfer manifold and the extract filtered through the 0.45 mm membrane bottoms of each well using house vacuum. Extracts are collected in a 96-well catch/assay plate in the bottom of the vacuum manifold and immediately placed on ice. To obtain extracts clarified by centrifugation, the content of each well, after detergent solubilization for 5 minutes, is removed and centrifuged for 15 minutes at 4 degree C. at 16,000×g.

[1285] Test the filtered extracts for levels of tyrosine kinase activity. Although many methods of detecting tyrosine kinase activity are known, one method is described here.

[1286] Generally, the tyrosine kinase activity of a supernatant is evaluated by determining its ability to phosphorylate a tyrosine residue on a specific substrate (a biotinylated peptide). Biotinylated peptides that can be used for this purpose include PSK1 (corresponding to amino acids 6-20 of the cell division kinase cdc2-p34) and PSK2 (corresponding to amino acids 1-17 of gastrin). Both peptides are substrates for a range of tyrosine kinases and are available from Boehringer Mannheim.

[1287] The tyrosine kinase reaction is set up by adding the following components in order. First, add 10 ul of 5 uM Biotinylated Peptide, then 10 ul ATP/Mg₂₊ (5 mM ATP/50 mM MgCl₂), then 10 ul of 5× Assay Buffer (40 mM imidazole hydrochloride, pH7.3, 40 mM beta-glycerophosphate, 1 mM EGTA, 100 mM MgCl₂, 5 mM MnCl₂, 0.5 mg/ml BSA), then 5 ul of Sodium Vanadate (1 mM), and then 5 ul of water. Mix the components gently and preincubate the reaction mix at 30 degree C. for 2 min. Initial the reaction by adding 10 ul of the control enzyme or the filtered supernatant.

[1288] The tyrosine kinase assay reaction is then terminated by adding 10 ul of 120 mm EDTA and place the reactions on ice.

[1289] Tyrosine kinase activity is determined by transferring 50 ul aliquot of reaction mixture to a microtiter plate (MTP) module and incubating at 37 degree C. for 20 min. This allows the streptavidin coated 96 well plate to associate with the biotinylated peptide. Wash the MTP module with 300 ul/well of PBS four times. Next add 75 ul of anti-phospotyrosine antibody conjugated to horse radish peroxidase (anti-P-Tyr-POD(0.5 u/ml)) to each well and incubate at 37 degree C. for one hour. Wash the well as above.

[1290] Next add 100 ul of peroxidase substrate solution (Boehringer Mannheim) and incubate at room temperature for at least 5 mins (up to 30 min). Measure the absorbance of the sample at 405 nm by using ELISA reader. The level of bound peroxidase activity is quantitated using an ELISA reader and reflects the level of tyrosine kinase activity.

### Example 39

### High-Throutghput Screening Assay Identifying Phosphorylation Activity

[1291] As a potential alternative and/or complement to the assay of protein tyrosine kinase activity described in Example 38, an assay which detects activation (phosphorylation) of major intracellular signal transduction intermediates can also be used. For example, as described below one particular assay can detect tyrosine phosphorylation of the Erk-1 and Erk-2 kinases. However, phosphorylation of other molecules, such as Raf, JNK, p38 MAP, Map kinase kinase (MEK), MEK kinase, Src, Muscle specific kinase (MuSK), IRAK, Tec, and Janus, as well as any other phosphoserine, phosphotyrosine, or phosphothreonine molecule, can be detected by substituting these molecules for Erk-1 or Erk-2 in the following assay.

[1292] Specifically, assay plates are made by coating the wells of a 96-well ELISA plate with 0.1 ml of protein G (1 ug/ml) for 2 hr at room temp, (RT). The plates are then rinsed with PBS and blocked with 3% BSA/PBS for 1 hr at RT. The protein G plates are then treated with 2 commercial monoclonal antibodies (100 ng/well) against Erk-1 and Erk-2 (1 hr at, RT) (Santa Cruz Biotechnology). (To detect other molecules, this step can easily be modified by substituting a monoclonal antibody detecting any of the above described molecules.) After 3-5 rinses with PBS, the plates are stored at 4 degree C. until use.

[1293] A431 cells are seeded at 20,000/well in a 96-well Loprodyne filterplate and cultured overnight in growth medium. The cells are then starved for 48 hr in basal medium (DMEM) and then treated with EGF (6 ng/well) or 50 ul of the supernatants obtained in Example 30 for 5-20 minutes. The cells are then solubilized and extracts filtered directly into the assay plate.

[1294] After incubation with the extract for 1 hr at RT, the wells are again rinsed. As a positive control, a commercial preparation of MAP kinase (10 ng/well) is used in place of A431 extract. Plates are then treated with a commercial polyclonal (rabbit) antibody (1 ug/ml) which specifically recognizes the phosphorylated epitope of the Erk-1 and Erk-2 kinases (1 hr at RT). This antibody is biotinylated by standard procedures. The bound polyclonal antibody is then quantitated by successive incubations with Europium-streptavidin and Europium fluorescence enhancing reagent in the Wallac DELFIA instrument (time-resolved fluorescence). An increased fluorescent signal over background indicates a phosphorylation by polypeptide of the present invention or a molecule induced by polypeptide of the present invention.

### Example 40

### Assay for the Stimulation of Bone Marrow CD34+ Cell Proliferation

[1295] This assay is based on the ability of human CD34+ to proliferate in the presence of hematopoietic growth factors and evaluates the ability of isolated polypeptides expressed in mammalian cells to stimulate proliferation of CD34+ cells.

[1296] It has been previously shown that most mature precursors will respond to only a single signal. More immature precursors require at least two signals to respond. Therefore, to tests the effect of polypeptides on hematopoietic activity of a wide range of progenitor cells, the assay contains a given polypeptide in-the presence or absence of other hematopoietic growth factors. Isolated cells are cultured for 5 days in the presence of Stem Cell Factor (SCF) in combination with tested sample. SCF alone has a very limited effect on the proliferation of bone marrow (BM) cells, acting in such conditions only as a “survival” factor. However, combined with any factor exhibiting stimulatory effect on these cells (e.g., IL-3), SCF will cause a synergistic effect. Therefore, if the tested polypeptide has a stimulatory effect on hematopoietic progenitors, such activity can be easily detected. Since normal BM cells have a low level of cycling cells, it is likely that any inhibitory effect of a given polypeptide, or agonists or antagonists thereof, might not be detected. Accordingly, assays for an inhibitory effect on progenitors is preferably tested in cells that are first subjected to in vitro stimulation with SCF+IL+3, and then contacted with the compound that is being evaluated for inhibition of such induced proliferation.

[1297] Briefly, CD34+ cells are isolated using methods known in the art. The cells are thawed and resuspended in medium (QBSF 60 serum-free medium with 1% L-glutamine (500 ml ) Quality Biological, Inc., Gaithersburg, Md. Cat# 160-204-101). After several gentle centrifugation steps at 200× g, cells are allowed to rest for one hour. The cell count is adjusted to 2.5×10⁵ cells/mt. During this time, 100 μl of sterile water is added to the peripheral wells of a 96-well plate. The cytokines that can be tested with a given polypeptide in this assay is rhSCF (R&D Systems, Minneapolis, Minn., Cat# 255-SC) at 50 ng/ml alone and in combination with rhSCF and rhIL-3 (R&D Systems, Minneapolis, Minn., Cat# 203-ML) at 30 ng/ml. After one hour, 10 μl of prepared cytokines, 50 μl of the supernatants prepared in Example 30 (supernatants at 1:2 dilution=50 μl) and 20 μl of diluted cells are added to the media which is already present in the wells to allow for a final total volume of 100 μl. The plates are then placed in a 37° C./5% CO₂ incubator for five days.

[1298] Eighteen hours before the assay is harvested, 0.5 μCi/well of [3H] Thymidine is added in a 10 μl volume to each well to determine the proliferation rate. The experiment is terminated by harvesting the cells from each 96-well plate to a filtermat using the Tomtec Harvester 96. After harvesting, the filtermats are dried, trimmed and placed into OmniFilter assemblies consisting of one OmniFilter plate and one OmnniFilter Tray. 60 μl Microscint is added to each well and the plate sealed with TopSeal-A press-on sealing film A bar code 15 sticker is affixed to the first plate for counting. The sealed plates are then loaded and the level of radioactivity determined via the Packard Top Count and the printed data collected for analysis. The level of radioactivity reflects the amount of cell proliferation.

[1299] The studies described in this example test the activity of a given polypeptide to stimulate bone marrow CD34+ cell proliferation. One skilled in the art could easily modify the exemplified studies to test the activity of polynucleotides (e.g., gene therapy), antibodies, agonists, and/or antagonists and fragments and variants thereof. As a nonlimiting example, potential antagonists tested in this assay would be expected to inhibit cell proliferation in the presence of cytokines and/or to increase the inhibition of cell proliferation in the presence of cytokines and a given polypeptide. In contrast, potential agonists tested in this assay would be expected to enhance cell proliferation and/or to decrease the inhibition of cell proliferation in the presence of cytokines and a given polypeptide.

[1300] The ability of a gene to stimulate the proliferation of bone marrow CD34+ cells indicates that polynucleotides and polypeptides corresponding to the gene are useful for the diagnosis and treatment of disorders affecting the immune system and hematopoiesis. Representative uses are described in the “Immune Activity” and “Infectious Disease” sections above, and elsewhere herein.

### Example 41

### Assay for Extracellular Matrix Enhanced Cell Response (EMECR)

[1301] The objective of the Extracellular Matrix Enhanced Cell Response (EMECR) assay is to identify gene products (e.g., isolated polypeptides) that act on the hematopoietic stem cells in the context of the extracellular matrix (ECM) induced signal.

[1302] Cells respond to the regulatory factors in the context of signal(s) received from the surrounding microenvironment. For example, fibroblasts, and endothelial and epithelial stem cells fail to replicate in the absence of signals from the ECM. Hematopoietic stem cells can undergo self-renewal in the bone marrow, but not in in vitro suspension culture. The ability of stem cells to undergo self-renewal in vitro is dependent upon their interaction with the stromal cells and the ECM protein fibronectin (fn). Adhesion of cells to fn is mediated by the α₅.β₁ and α₄.β₁ integrin receptors, which are expressed by human and mouse hematopoietic stem cells. The factor(s) which integrate with the ECM environment and are responsible for stimulating stem cell self-renewal have not yet been identified. Discovery of such factors should be of great interest in gene therapy and bone marrow transplant applications

[1303] Briefly, polystyrene, non tissue culture treated, 96-well plates are coated with fn fragment at a coating concentration of 0.2 μg/cm². Mouse bone marrow cells are plated (1,000 cells/well ) in 0.2 ml of serum-free medium. Cells cultured in the presence of IL-3 ( 5 ng/ml )+SCF ( 50 ng/ml ) would serve as the positive control, conditions under which little self-renewal but pronounced differentiation of the stem cells is to be expected. Gene products of the invention (e.g., including, but not limited to, polynucleotides and polypeptides of the present invention, and supernatants produced in Example 30), are tested with appropriate negative controls in the presence and absence of SCF(5.0 ng/ml), where test factor supernatants represent 10% of the total assay volume. The plated cells are then allowed to grow by incubating in a low oxygen environment ( 5% CO₂, 7% O₂, and 88% N₂ ) tissue culture incubator for 7 days. The number of proliferating cells within the wells is then quantitated by measuring thymidine incorporation into cellular DNA. Verification of the positive hits in the assay will require phenotypic characterization of the cells, which can be accomplished by scaling up of the culture system and using appropriate antibody reagents against cell surface antigens and FACScan.

[1304] One skilled in the art could easily modify the exemplified studies to test the activity of polynucleotides (e.g., gene therapy), antibodies, agonists, and/or antagonists and fragments and variants thereof.

[1305] If a particular polypeptide of the present invention is found to be a stimulator of hematopoietic progenitors, polynucleotides and polypeptides corresponding to the gene encoding said polypeptide may be useful for the diagnosis and treatment of disorders affecting the immune system and hematopoiesis. Representative uses are described in the “Immune Activity” and “Infectious Disease” sections above, and elsewhere herein. The gene product may also be useful in the expansion of stem cells and committed progenitors of various blood lineages, and in the differentiation and/or proliferation of various cell types.

[1306] Additionally, the polynucleotides and/or polypeptides of the gene of interest and/or agonists and/or antagonists thereof, may also be employed to inhibit the proliferation and differentiation of hematopoietic cells and therefore may be employed to protect bone marrow stem cells from chemotherapeutic agents during chemotherapy. This antiproliferative effect may allow administration of higher doses of chemotherapeutic agents and, therefore, more effective chemotherapeutic treatment.

[1307] Moreover, polynucleotides and polypeptides corresponding to the gene of interest may also be useful for the treatment and diagnosis of hematopoietic related disorders such as, for example, anemia, pancytopenia, leukopenia, thrombocytopenia or leukemia since stromal cells are important in the production of cells of hematopoietic lineages. The uses include bone marrow cell ex-vivo culture, bone marrow transplantation, bone marrow reconstitution, radiotherapy or chemotherapy of neoplasia.

### Example 42

### Human Dermal Fibroblast and Aortic Smooth Muscle Cell Proliferation

[1308] The polypeptide of interest is added to cultures of normal human dermal fibroblasts (NHDF) and human aortic smooth muscle cells (AoSMC) and two co-assays are performed with each sample. The first assay examines the effect of the polypeptide of interest on the proliferation of normal human dermal fibroblasts (NHDF) or aortic smooth muscle cells (AoSMC). Aberrant growth of fibroblasts or smooth muscle cells is a part of several pathological processes, including fibrosis, and restenosis. The second assay examines IL6 production by both NHDF and SMC. IL6 production is an indication of functional activation. Activated cells will have increased production of a number of cytokines and other factors, which can result in a proinflammatory or immunomodulatory outcome. Assays are run with and without co-TNFa stimulation, in order to check for costimulatory or inhibitory activity.

[1309] Briefly, on day 1, 96-well black plates are set up with 1000 cells/well (NHDF) or 2000 cells/well (AoSMC) in 100 μl culture media. NHDF culture media contains: Clonetics FB basal media, 1 mg/ml hFGF, 5 mg/ml insulin, 50 mg/ml gentamycin, 2% FBS, while AoSMC culture media contains Clonetics SM basal media, 0.5 μg/ml hEGF, 5 mg/ml insulin, 1 μg/ml hFGF, 50 mg/ml gentamycin, 50 μg/ml Amphotericin B, 5% FBS. After incubation at 37° C. for at least 4-5 hours culture media is aspirated and replaced with growth arrest media. Growth arrest media for NHDF contains fibroblast basal media, 50 mg/ml gentamycin, 2% FBS, while growth arrest media for AoSMC contains SM basal media, 50 mg/ml gentamycin, 50 μg/ml Amphotericin B, 0.4% FBS. Incubate at 37° C. until day 2.

[1310] On day 2, serial dilutions and templates of the polypeptide of interest are designed such that they always include media controls and known-protein controls. For both stimulation and inhibition experiments, proteins are diluted in growth arrest media. For inhibition experiments, TNFa is added to a final concentration of 2 ng/ml (NHDF) or 5 ng/ml (AoSMC). Add ⅓ vol media containing controls or polypeptides of the present invention and incubate at 37 degrees C./5% CO₂ until day 5.

[1311] Transfer 60 μl from each well to another labeled 96-well plate, cover with a plate-sealer, and store at 4 degrees C. until Day 6 (for IL6 ELISA). To the remaining 100 μl in the cell culture plate, aseptically add Alamar Blue in an amount equal to 10% of the culture volume (10 μl). Return plates to incubator for 3 to 4 hours. Then measure fluorescence with excitation at 530 nm and emission at 590 nm using the CytoFluor. This yields the growth stimulation/inhibition data.

[1312] On day 5, the IL6 ELISA is performed by coating a 96 well plate with 50-100 ul/well of Anti-Human IL6 Monoclonal antibody diluted in PBS, pH 7.4, incubate ON at room temperature.

[1313] On day 6, empty the plates into the sink and blot on-paper towels. Prepare Assay Buffer containing PBS with 4% BSA. Block the plates with 200 μl/well of Pierce Super Block blocking buffer in PBS for 1-2 hr and then wash plates with wash buffer (PBS, 0.05% Tween-20). Blot plates on paper towels. Then add 50 μl/well of diluted Anti-Human IL-6 Monoclonal, Biotin-labeled antibody at 0.50 mg/ml. Make dilutions of IL-6 stock in media (30, 10, 3, 1, 0.3, 0 ng/ml). Add duplicate samples to top row of plate. Cover the plates and incubate for 2 hours at RT on shaker.

[1314] Plates are washed with wash buffer and blotted on paper towels. Dilute EU-labeled Streptavidin 1:1000 in Assay buffer, and add 100 μl/well. Cover the plate and incubate 1 h at RT. Plates are again washed with wash buffer and blotted on paper towels.

[1315] Add 100 μl/well of Enhancement Solution. Shake for 5 minutes. Read the plate on the Wallac DELFIA Fluorometer. Readings from triplicate samples in each assay were tabulated and averaged.

[1316] A positive result in this assay suggests AoSMC cell proliferation and that the polypeptide of the present invention may be involved in dermal fibroblast proliferation and/or smooth muscle cell proliferation. A positive result also suggests many potential uses of polypeptides, polynucleotides, agonists and/or antagonists of the polynucleotide/polypeptide of the present invention which gives a positive result. For example, inflammation and immune responses, wound healing, and angiogenesis, as detailed throughout this specification. Particularly, polypeptides of the present invention and potynucleotides of the present invention may be used in wound healing and dermal regeneration, as well as the promotion of vasculogenesis, both of the blood vessels and lymphatics. The growth of vessels can be used in the treatment of, for example, cardiovascular diseases. Additionally, antagonists of polypeptides and polynucleotides of the invention may be useful in treating diseases, disorders, and/or conditions which involve angiogenesis by acting as an anti-vascular agent (e.g., anti-angiogenesis). These diseases, disorders, and/or conditions are known in the art and/or are described herein, such as, for example, malignancies, solid tumors, benign tumors, for example hemangiomas, acoustic neuromas, neurofibromas, trachomas, and pyogenic granulomas; artheroscleric plaques; ocular angiogenic diseases, for example, diabetic retinopathy, retinopathy of prematurity, macular degeneration, corneal graft rejection, neovascular glaucoma, retrolental fibroplasia, rubeosis, retinoblastoma, uvietis and Pterygia (abnormal blood vessel growth) of the eye; rheumatoid arthritis; psoriasis; delayed wound healing; endometriosis; vasculogenesis; granulations; hypertrophic scars (keloids); nonunion fractures; scleroderma; trachoma; vascular adhesions; myocardial angiogenesis; coronary collaterals; cerebral collaterals; arteriovenous malformations; ischemic limb angiogenesis; Osler-Webber Syndrome; plaque neovascularization; telangiectasia; hemophiliac joints; angiofibroma; fibromuscular dysplasia; wound granulation; Crohn's disease; and atherosclerosis. Moreover, antagonists of polypeptides and polynucleotides of the invention may be useful in treating anti-hyperproliferative diseases and/or anti-inflammatory known in the art and/or described herein.

[1317] One skilled in the art could easily modify the exemplified studies to test the activity of polynucleotides (e.g., gene therapy), antibodies, agonists, and/or antagonists and fragments and variants thereof.

### Example 43

### Cellular Adhesion Molecule (CAM) Expression on Endothelial Cells

[1318] The recruitment of lymphocytes to areas of inflammation and angiogenesis involves specific receptor-ligand interactions between cell surface adhesion molecules (CAMs) on lymphocytes and the vascular endothelium. The adhesion process, in both normal and pathological settings, follows a multi-step cascade that involves intercellular adhesion molecule-1 (ICAM-1), vascular cell adhesion molecule-1 (VCAM-1), and endothelial leukocyte adhesion molecule-1 (E-selectin) expression on endothelial cells (EC). The expression of these molecules and others on the vascular endothelium determines the efficiency with which leukocytes may adhere to the local vasculature and extravasate into the local tissue during the development of an inflammatory response. The local concentration of cytokines and growth factor participate in the modulation of the expression of these CAMs.

[1319] Briefly, endothelial cells (e.g., Human Umbilical Vein Endothelial cells (HUVECs)) are grown in a standard 96 well plate to confluence, growth medium is removed from the cells and replaced with 100 μl of 199 Medium (10% fetal bovine serum (FBS)). Samples for testing and positive or negative controls are added to the plate in triplicate (in 10 μl volumes). Plates are then incubated at 37° C. for either 5 h (selectin and integrin expression) or 24 h (integrin expression only). Plates are aspirated to remove medium and 100 μl of 0.1% paraformaldehyde-PBS(with Ca++ and Mg++) is added to each well. Plates are held at 4° C. for 30 min. Fixative is removed from the wells and wells are washed 1× with PBS(+Ca,Mg)+0.5% BSA and drained. 10 μl of diluted primary antibody is added to the test and control wells. Anti-ICAM-1-Biotin, Anti-VCAM-1-Biotin and Anti-E-selectin-Biotin are used at a concentration of 10 μg/ml (1:10 dilution of 0.1 mg/ml stock antibody). Cells are incubated at 37° C. for 30 min. in a humidified environment. Wells are washed three times with PBS(+Ca,Mg)+0.5% BSA. 20 μl of diluted ExtrAvidin-Alkaline Phosphatase (1:5,000 dilution, referred to herein as the working dilution) are added to each well and incubated at 37° C. for 30 min. Wells are washed three times with PBS(+Ca,Mg)+0.5% BSA. Dissolve 1 tablet of p-Nitrophenol Phosphate pNPP per 5 ml of glycine buffer (pH 10.4). 100 μl of pNPP substrate in glycine buffer is added to each test well. Standard wells in triplicate are prepared from the working dilution of the ExtrAvidin-Alkaline Phosphotase in glycine buffer: 1:5,000 (10⁰)>10^{-0.5} >10⁻¹>10^{-1.5}0.5 μl of each dilution is added to triplicate wells and the resulting AP content in each well is 5.50 ng, 1.74 ng, 0.55 ng, 0.18 ng. 100 μl of pNNP reagent is then added to each of the standard wells. The plate is incubated at 37° C. for 4 h. A volume of 50 μl of 3M NaOH is added to all wells. The plate is read on a plate reader at 405 nm using the background subtraction option on blank wells filled with glycine buffer only. Additionally, the template is set up to indicate the concentration of AP-conjugate in each standard well [5.50 ng; 1.74 ng; 0.55 ng; 0.18 ng]. Results are indicated as amount of bound AP-conjugate in each sample.

### Example 44

### Alamar Blue Endothelial Cells Proliferation Assay

[1320] This assay may be used to quantitatively determine protein mediated inhibition of bFGF-induced proliferation of Bovine Lymphatic Endothelial Cells (LECs), Bovine Aortic Endothelial Cells (BAECs) or Human Microvascular Uterine Myometrial Cells (UTMECs). This assay incorporates a fluorometric growth indicator based on detection of metabolic activity. A standard Alamar Blue Proliferation Assay is prepared in EGM-2MV with 10 ng/ml of bFGF added as a source of endothelial cell stimulation. This assay may be used with a variety of endothelial cells with slight changes in growth medium and cell concentration. Dilutions of the protein batches to be tested are diluted as appropriate. Serum-free medium (GIBCO SFM) without bFGF is used as a non-stimulated control and Angiostatin or TSP-1 are included as a known inhibitory controls.

[1321] Briefly, LEC, BAECs or UTMECs are seeded in growth media at a density of 5000 to 2000 cells/well in a 96 well plate and placed at 37degrees C. overnight. After the overnight incubation of the cells, the growth media is removed and replaced with GIBCO EC-SFM. The cells are treated with the appropriate dilutions of the protein of interest or control protein sample(s) (prepared in SFM ) in triplicate wells with additional bFGF to a concentration of 10 ng/ml. Once the cells have been treated with the samples, the plate(s) is/are placed back in the 37° C. incubator for three days. After three days 10 ml of stock alamar blue (Biosource Cat# DAL1100) is added to each well and the plate(s) is/are placed back in the 37° C. incubator for four hours. The plate(s) are then read at 530 nm excitation and 590 nm emission using the CytoFluor fluorescence reader. Direct output is recorded in relative fluorescence units.

[1322] Alamar blue is an oxidation-reduction indicator that both fluoresces and changes color in response to chemical reduction of growth medium resulting from cell growth. As cells grow in culture, innate metabolic activity results in a chemical reduction of the immediate surrounding environment. Reduction related to growth causes the indicator to change from oxidized (non-fluorescent blue) form to reduced (fluorescent red) form (i.e., stimulated proliferation will produce a stronger signal and inhibited proliferation will produce a weaker signal and the total signal is proportional to the total number of cells as well as their metabolic activity). The background level of activity is observed with the starvation medium alone. This is compared to the output observed from the positive control samples (bFGF in growth medium) and protein dilutions.

### Example 45

### Detection of Inhibition of a Mixed Lymphocyte Reaction

[1323] This assay can be used to detect and evaluate inhibition of a Mixed Lymphocyte Reaction (MLR) by gene products (e.g., isolated polypeptides). Inhibition of a MLR may be due to a direct effect on cell proliferation and viability, modulation of costimulatory molecules on interacting cells, modulation of adhesiveness between lymphocytes and accessory cells, or modulation of cytokine production by accessory cells. Multiple cells may be targeted by these polypeptides since the peripheral blood mononuclear fraction used in this assay includes T, B and natural killer lymphocytes, as well as monocytes and dendritic cells.

[1324] Polypeptides of interest found to inhibit the MLR may find application in diseases associated with lymphocyte and monocyte activation or proliferation. These include, but are not limited to, diseases such as asthma, arthritis, diabetes, inflammatory skin conditions, psoriasis, eczema, systemic lupus erythematosus, multiple sclerosis, glomerulonephritis, inflammatory bowel disease, crohn's disease, ulcerative colitis, arteriosclerosis, cirrhosis, graft vs. host disease, host vs. graft disease, hepatitis, leukemia and lymphoma.

[1325] Briefly, PBMCs from human donors are purified by density gradient centrifugation using Lymphocyte Separation Medium (LSM®, density 1.0770 g/ml, Organon Teknika Corporation, West Chester, Pa.). PBMCs from two donors are adjusted to 2×10⁶ cells/ml in RPMI-1640 (Life Technologies, Grand Island, N.Y.) supplemented with 10% FCS and 2 mM glutamine. PBMCs from a third donor is adjusted to 2×10⁵ cells/ml. Fifty microliters of PBMCs from each donor is added to wells of a 96-well round bottom microtiter plate. Dilutions of test materials (50 μl) is added in triplicate to microtiter wells. Test samples (of the protein of interest) are added for final dilution of 1:4; rhuIL-2 (R&D Systems, Minneapolis, Minn., catalog number 202-IL) is added to a final concentration of 1 μg/ml; anti-CD4 mAb (R&D Systems, clone 34930.11, catalog number MAB379) is added to a final concentration of 10 μg/ml. Cells are cultured for 7-8 days at 37° C. in 5% CO₂, and 1 μC of [³H] thymidine is added to wells for the last 16 hrs of culture. Cells are harvested and thymidine incorporation determined using a Packard TopCount. Data is expressed as the mean and standard deviation of triplicate determinations.

[1326] Samples of the protein of interest are screened in separate experiments and compared to the negative control treatment, anti-CD4 mAb, which inhibits proliferation of lymphocytes and the positive control treatment, IL-2 (either as recombinant material or supernatant), which enhances proliferation of lymphocytes.

[1327] One skilled in the art could easily modify the exemplified studies to test the activity of polynucleotides (e.g., gene therapy), antibodies, agonists, and/or antagonists and fragments and variants thereof.

### Example 46

### Assays for Protease Activity

[1328] The following assay may be used to assess protease activity of the polypeptides of the invention.

[1329] Gelatin and casein zymography are performed essentially as described (Heusen et al., Anal. Biochem., 102:196-202 (1980); Wilson et al., Journal of Urology, 149:653-658 (1993)). Samples are run on 10% polyacryamide/0.1% SDS gels containing 1% gelain orcasein, soaked in 2.5% triton at room temperature for 1 hour, and in 0.1M glycine, pH 8.3 at 37° C. 5 to 16 hours. After staining in amido black areas of proteolysis apear as clear areas agains the blue-black background. Trypsin (Sigma T8642) is used as a positive control.

[1330] Protease activity is also determined by monitoring the cleavage of n-a-benzoyl-L-arginine ethyl ester (BAEE) (Sigma B-4500. Reactions are set up in (25 mMNaPO₄,1 mM EDTA, and 1 mM BAEE), pH 7.5. Samples are added and the change in adsorbance at 260 nm is monitored on the Beckman DU-6 spectrophotometer in the time-drive mode. Trypsin is used as a positive control.

[1331] Additional assays based upon the release of acid-soluble peptides from casein or hemoglobin measured as adsorbance at 280 nm or colorimetrically using the Folin method are performed as described in Bergmeyer, et al., Methods of Enzymatic Analysis, 5 (1984). Other assays involve the solubilization of chromogenic substrates (Ward, Applied Science, 251-317 (1983).

### Example 47

### Identifying Serine Protease Substrate Specificity

[1332] Methods known in the art or described herein may be used to determine the substrate specificity of the polypeptides of the present invention having serine protease activity. A preferred method of determining substrate specificity is by the use of positional scanning synthetic combinatorial libraries as described in GB 2 324 529 (incorporated herein in its entirety).

### Example 48

### Ligand Binding Assays

[1333] The following assay may be used to assess ligand binding activity of the polypeptides of the invention.

[1334] Ligand binding assays provide a direct method for ascertaining receptor pharmacology and are adaptable to a high throughput format. The purified ligand for a polypeptide is radiolabeled to high specific activity (50-2000 Ci/mmol) for binding studies. A determination is then made that the process of radiolabeling does not diminish the activity of the ligand towards its polypeptide. Assay conditions for buffers, ions, pH and other modulators such as nucleotides are optimized to establish a workable signal to noise ratio for both membrane and whole cell polypeptide sources. For these assays, specific polypeptide binding is defined as total associated radioactivity minus the radioactivity measured in the presence of an excess of unlabeled competing ligand. Where possible, more than one competing ligand is used to define residual nonspecific binding.

### Example 49

### Functional Assay in Xenopus Oocytes

[1335] Capped RNA transcripts from linearized plasmid templates encoding the polypeptides of the invention are synthesized in vitro with RNA polymerases in accordance with standard procedures. In vitro transcripts are suspended in water at a final concentration of 0.2 mg/mi. Ovarian lobes are removed from adult female toads, Stage V defolliculated oocytes are obtained, and RNA transcripts (10 ng/oocytc) are injected in a 50 nl bolus using a microinjection apparatus. Two electrode voltage clamps are used to measure the currents from individual Xenopus oocytes in response polypeptides and polypeptide agonist exposure. Recordings are made in Ca2+ free Barth's medium at room temperature. The Xenopus system can be used to screen known ligands and tissue/cell extracts for activating ligands.

### Example 50

### Microphysiometric Assays

[1336] Activation of a wide variety of secondary messenger systems results in extrusion of small amounts of acid from a cell. The acid formed is largely as a result of the increased metabolic activity required to fuel the intracellular signaling process. The pH changes in the media surrounding the cell are very small but are detectable by the CYTOSENSOR microphysiometer (Molecular Devices Ltd., Menlo Park, Calif.). The CYTOSENSOR is thus capable of detecting the activation of polypeptide which is coupled to an energy utilizing intracellular signaling pathway.

### Example 51

### Extract/Cell Supernatant Screening

[1337] A large number of mammalian receptors exist for which there remains, as yet, no cognate activating ligand (agonist). Thus, active ligands for these receptors may not be included within the ligands banks as identified to date. Accordingly, the polypeptides of the invention can also be functionally screened (using calcium, cAMP, microphysiometer, oocyte electrophysiology, etc., functional screens) against tissue extracts to identify its natural ligands. Extracts that produce positive functional responses can be sequentially subfractionated until an activating ligand is isolated and identified.

### Example 52

### Calcium and cAMP Functional Assays

[1338] Seven transmembrane receptors which are expressed in HEK 293 cells have been shown to be coupled functionally to activation of PLC and calcium mobilization and/or cAMP stimulation or inhibition. Basal calcium levels in the HEK 293 cells in receptor-transfected or vector control cells were observed to be in the normal, 100 nM to 200 nM, range. HEK 293 cells expressing recombinant receptors are loaded with fura 2 and in a single day >150 selected ligands or tissue/cell extracts are evaluated for agonist induced calcium mobilization. Similarly, HEK 293 cells expressing recombinant receptors are evaluated for the stimulation or inhibition of cAMP production using standard cAMP quantitation assays. Agonists presenting a calcium transient or cAMP fluctuation are tested in vector control cells to determine if the response is unique to the transfected cells expressing receptor.

### Example 53

### ATP-binding Assay

[1339] The following assay may be used to assess ATP-binding activity of polypeptides of the invention.

[1340] ATP-binding activity of the polypeptides of the invention may be detected using the ATP-binding assay described in U.S. Pat. No. 5,858,719, which is herein incorporated by reference in its entirety. Briefly, ATP-binding to polypeptides of the invention is measured via photoaffinity labeling with 8-azido-ATP in a competition assay. Reaction mixtures containing 1 mg/ml of the ABC transport protein of the present invention are incubated with varying concentrations of ATP, or the non-hydrolyzable ATP analog adenyl-5′-imidodiphosphate for 10 minutes at 4° C. A mixture of 8-azido-ATP (Sigma Chem. Corp., St. Louis, Mo.) plus 8-azido-ATP (³²P-ATP) (5 mCi/μmol, ICN, Irvine Calif.) is added to a final concentration of 100 μM and 0.5 ml aliquots are placed in the wells of a porcelain spot plate on ice. The plate is irradiated using a short wave 254 nm UV lamp at a distance of 2.5 cm from the plate for two one-minute intervals with a one-minute cooling interval in between. The reaction is stopped by addition of dithiothreitol to a final concentration of 2 mM. The incubations are subjected to SDS-PAGE electrophoresis, dried, and autoradiographed. Protein bands corresponding to the particular polypeptides of the invention are excised, and the radioactivity quantified. A decrease in radioactivity with increasing ATP or adenly-5′-imidodiphosphate provides a measure of ATP affinity to the polypeptides.

### Example 54

### Small Molecule Screening

[1341] This invention is particularly useful for screening therapeutic compounds by using the polypeptides of the invention, or binding fragments thereof, in any of a variety of drug screening techniques. The potypeptide or fragment employed in such a test may be affixed to a solid support, expressed on a cell surface, free in solution, or located intracellularly. One method of drug screening utilizes eukaryotic or prokaryotic host cells which are stably transformed with recombinant nucleic acids expressing the polypeptide or fragment. Drugs are screened against such transformed cells in competitive binding assays. One may measure, for example, the formulation of complexes between the agent being tested and potypeptide of the invention.

[1342] Thus, the present invention provides methods of screening for drugs or any other agents which affect activities mediated by the polypeptides of the invention. These methods comprise contacting such an agent with a polypeptide of the invention or fragment thereof and assaying for the presence of a complex between the agent and the polypeptide or fragment thereof, by methods well known in the art. In such a competitive binding assay, the agents to screen are typically labeled. Following incubation, free agent is separated from that present in bound form, and the amount of free or uncomplexed label is a measure of the ability of a particular agent to bind to the polypeptides of the invention.

[1343] Another technique for drug screening provides high throughput screening for compounds having suitable binding affinity to the polypeptides of the invention, and is described in great detail in European Patent Application 84/03564, published on Sep. 13, 1984, which is herein incorporated by reference in its entirety. Briefly stated, large numbers of different small molecule test compounds are synthesized on a solid substrate, such as plastic pins or some other surface. The test compounds are reacted with polypeptides of the invention and washed. Bound polypeptides are then detected by methods well known in the art. Purified polypeptides are coated directly onto plates for use in the aforementioned drug screening techniques. In addition, non-neutralizing antibodies may be used to capture the peptide and immobilize it on the solid support.

[1344] This invention also contemplates the use of competitive drug screening assays in which neutralizing antibodies capable of binding polypeptides of the invention specifically compete with a test compound for binding to the polypeptides or fragments thereof. In this manner, the antibodies are used to detect the presence of any peptide which shares one or more antigenic epitopes with a potypeptide of the invention.

### Example 55

### Phosphorylation Assay

[1345] In order to assay for phosphorylation activity of the polypeptides of the invention, a phosphorylation assay as described in U.S. Pat. No. 5,958,405 (which is herein incorporated by reference) is utilized. Briefly, phosphorylation activity may be measured by phosphorylation of a protein substrate using gamma-labeled ³²P-ATP and quantitation of the incorporated radioactivity using a gamma radioisotope counter. The polypeptides of the invention are incubated with the protein substrate, ³²P-ATP, and a kinase buffer. The ³²P incorporated into the substrate is then separated from free 32P-ATP by electrophoresis, and the incorporated ³²P is counted and compared to a negative control. Radioactivity counts above the negative control are indicative of phosphorylation activity of the polypeptides of the invention.

### Example 56

### Detection of Phosphorylation Activity (Activation) of the Polypeptides of the Invention in the Presence of Polypeptide Ligands

[1346] Methods known in the art or described herein may be used to determine the phosphorylation activity of the polypeptides of the invention. A preferred method of determining phosphorylation activity is by the use of the tyrosine phosphorylation assay as described in U.S. Pat. No. 5,817,471 (incorporated herein by reference).

### Example 57

### Identification of Signal Transduction Proteins That Interact With Polypeptides of the Present Invention

[1347] The purified polypeptides of the invention are research tools for the identification, characterization and purification of additional signal transduction pathway proteins or receptor proteins. Briefly, labeled receptor PTK polypeptide is useful as a reagent for the purification of molecules with which it interacts. In one embodiment of affinity purification, receptor PTK polypeptide is covalently coupled to a chromatography column. Cell-free extract derived from putative target cells, such as carcinoma tissues, is passed over the column, and molecules with appropriate affinity bind to the receptor PTK polypeptides, or specific phosphotyrosine-recognition domains thereof. The receptor PTK polypeptide interacting protein-complex is recovered from the column, dissociated, and the recovered molecule subjected to N-terminal protein sequencing. This amino acid sequence is then used to identify the captured molecule or to design degenerate oligonucleotide probes for cloning the relevant gene from an appropriate cDNA library.

### Example 58

### IL-6 Bioassay

[1348] To test the proliferative effects of the polypeptides of the invention, the IL-6 Bioassay as described by Marz et al. is utilized (Proc. Natl. Acad. Sci., U.S.A., 95:3251-56 (1998), which is herein incorporated by reference). Briefly, IL-6 dependent B9 murine cells are washed three times in IL-6 free medium and plated at a concentration of 5,000 cells per well in 50 μl, and 50 μl of the IL-6-like polypeptide is added. After 68 hrs. at 37° C., the number of viable cells is measured by adding the tetrazolium salt thiazolyl blue (MTT) and incubating for a further 4 hrs. at 37° C. B9 cells are lysed by SDS and optical density is measured at 570 nm. Controls containing IL-6 (positive) and no cytokine (negative) are utilized. Enhanced proliferation in the test sample(s) relative to the negative control is indicative of proliferative effects mediated by polypeptides of the invention.

### Example 59

### Support of Chicken Embryo Neuron Survival

[1349] To test whether sympathetic neuronal cell viability is supported by polypeptides of the invention, the chicken embryo neuronal survival assay of Senaldi et al. is utilized (Proc. Natl. Acad. Sci., U.S.A., 96:11458-63 (1998), which is herein incorporated by reference). Briefly, motor and sympathetic neurons are isolated from chicken embryos, resuspended in L15 medium (with 10% FCS, glucose, sodium selenite, progesterone, conalbumin, putrescine, and insulin; Life Technologies, Rockville, Md.) and Dulbecco's modified Eagles medium [with 10% FCS, glutamine, penicillin, and 25 mM Hepes buffer (pH 7.2); Life Technologies, Rockville, Md.], respectively, and incubated at 37° C. in 5% CO₂ in the presence of different concentrations of the purified IL-6-like polypeptide, as well as a negative control lacking any cytokine. After 3 days, neuron survival is determined by evaluation of cellular morphology, and through the use of the colorimetric assay of Mosmann (Mossman, T., J. Immunol. Methods, 65:55-63 (1983)). Enhanced neuronal cell viability as, compared to the controls lacking cytokine is indicative of the ability of the inventive purified IL-6-like polypeptide(s) to enhance the survival of neuronal cells.

### Example 60

### Assay for Phosphatase Activity

[1350] The following assay may be used to assess serine/threonine phosphatase (PTPase) activity of the polypeptides of the invention.

[1351] In order to assay for serine/threonine phosphatase (PTPase) activity, assays can be utilized which are widely known to those skilled in the art. For example, the serine/threonine phosphatase (PSPase) activity is measured using a PSPase assay kit from New England Biolabs, Inc. Myelin basic protein (MyBP), a substrate for PSPase, is phosphorylated on serine and threonine residues with cAMP-dependent Protein Kinase in the presence of (³²P]ATP. Protein serine/threonine phosphatase activity is then determined by measuring the release of inorganic phosphate from 32P-labeled MyBP.

### Example 61

### Interaction of Serine/Threonine Phosphatases with Other Proteins

[1352] The polypeptides of the invention with serine/threonine phosphatase activity as determined in Example 60 are research tools for the identification, characterization and purification of additional interacting proteins or receptor proteins, or other signal transduction pathway proteins. Briefly, labeled polypeptide(s) of the invention is useful as a reagent for the purification of molecules with which it interacts. In one embodiment of affinity purification, polypeptide of the invention is covalently coupled to a chromatography column. Cell-free extract derived from putative target cells, such as neural or liver cells, is passed over the column, and molecules with appropriate affinity bind to the polypeptides of the invention. The polypeptides of the invention -complex is recovered from the column, dissociated, and the recovered molecule subjected to N-terminal protein sequencing. This amino acid sequence is then used to identify the captured molecule or to design degenerate oligonucleotide probes for cloning the relevant gene from an appropriate cDNA library.

### Example 62

### Assaying for Heparanase Activity

[1353] In order to assay for heparanase activity of the polypeptides of the invention, the heparanase assay described by Vlodavsky et al is utilized (Vlodavsky, I., et al., Nat. Med., 5:793-802 (1999)). Briefly, cell lysates, conditioned media or intact cells (1×10⁶ cells per 35-mm dish) are incubated for 18 hrs at 37° C., pH 6.2-6.6, with ³⁵S-labeled ECM or soluble ECM derived peak I proteoglycans. The incubation medium is centrifuged and the supematant is analyzed by gel filtration on a Sepharose CL-6B column (0.9×30 cm). Fractions are eluted with PBS and their radioactivity is measured. Degradation fragments of heparan sulfate side chains are eluted from Sepharose 6B at 0.5<Kₐᵥ<0.8 (peak II). Each experiment is done at least three times. Degradation fragments corresponding to “peak II,” as described by Vlodavsky et al., is indicative of the activity of the polypeptides of the invention in cleaving heparan sulfate.

### Example 63

### Immobilization of Biomolecules

[1354] This example provides a method for the stabilization of polypeptides of the invention in non-host cell lipid bilayer constucts (see, e.g., Bieri et al., Nature Biotech 17:1105-1108 (1999), hereby incorporated by reference in its entirety herein) which can be adapted for the study of polypeptides of the invention in the various functional assays described above. Briefly, carbohydrate-specific chemistry for biotinylation is used to confine a biotin tag to the extracellular domain of the polypeptides of the invention, thus allowing uniform orientation upon immobilization. A 50 uM solution of polypeptides of the invention in washed membranes is incubated with 20 mM NaIO4 and 1.5 mg/ml (4 mM) BACH or 2 mg/ml (7.5 mM) biotin-hydrazide for 1 hr at room temperature (reaction volume, 150 ul). Then the sample is dialyzed (Pierce Slidealizer Cassett, 10 kDa cutoff; Pierce Chemical Co., Rockford Ill.) at 4 C. first for 5 h, exchanging the buffer after each hour, and finally for 12 h against 500 ml buffer R (0.15 M NaCl, 1 mM MgC12, 10 mM sodium phosphate, pH7). Just before addition into a cuvette, the sample is diluted 1:5 in buffer ROG50 (Buffer R supplemented with 50 mM octylglucoside).

### Example 64

### TAQMAN

[1355] Quantitative PCR (QPCR). Total RNA from cells in culture are extracted by Trizol separation as recommended by the supplier (LifeTechnologies). (Total RNA is treated with DNase I (Life Technologies) to remove any contaminating genomic DNA before reverse transcription.) Total RNA (50 ng) is used in a one-step, 50 ul, RT-QPCR, consisting of Taqman Buffer A (Perkin-Elmer; 50 mM KCl/10 mM Tris, pH 8.3), 5.5 mM MgCl₂, 240 μM each dNTP, 0.4 units RNase inhibitor(Promega), 8% glycerol, 0.012% Tween-20, 0.05% gelatin, 0.3 uM primers, 0.1 uM probe, 0.025 units Amplitaq Gold (Perkin-Elmer) and 2.5 units Superscript II reverse transcriptase (Life Technologies). As a control for genomic contamination, parallel reactions are setup without reverse transcriptase. The relative abundance of (unknown) and 18S RNAs are assessed by using the Applied Biosystems Prism 7700 Sequence Detection System (Livak, K. J., Flood, S. J., Marmaro, J., Giusti, W. & Deetz, K. (1995) PCR Methods Appl. 4, 357-362). Reactions are carried out at 48° C. for 30 min, 95° C. for 10 min, followed by 40 cycles of 95° C. for 15 s, 60° C. for 1 min. Reactions are performed in triplicate.

[1356] Primers (f & r) and FRET probes sets are designed using Primer Express Software (Perkin-Elmer). Probes are labeled at the 5′-end with the reporter dye 6-FAM and on the 3′-end with the quencher dye TAMRA (Biosource International, Camarillo, Calif. or Perkin-Elmer).

### Example 65

### Assays for Metalloproteinase Activity

[1357] Metalloproteinases (EC 3.4.24.-) are peptide hydrolases which use metal ions, such as Zn²⁺, as the catalytic mechanism. Metalloproteinase activity of polypeptides of the present invention can be assayed according to the following methods.

[1358] Proteolysis of alpha-2-macroglobulin

[1359] To confirm protease activity, purified polypeptides of the invention are mixed with the substrate alpha-2-macroglobulin (0.2 unit/ml; Boehringer Mannheim, Germany) in 1×assay buffer (50 mM HEPES, pH 7.5, 0.2 M NaCl, 10 mM CaCl₂, 25 μM ZnCl₂ and 0.05% Brij-35) and incubated at 37° C. for 1-5 days. Trypsin is used as positive control. Negative controls contain only alpha-2-macroglobulin in assay buffer. The samples are collected and boiled in SDS-PAGE sample buffer containing 5% 2-mercaptoethanol for 5-min, then loaded onto 8% SDS-polyacrylamide gel. After electrophoresis the proteins are visualized by silver staining. Proteolysis is evident by the appearance of lower molecular weight bands as compared to the negative control.

[1360] Inhibition of alpha-2-macroglobulin Proteolysis by Inhibitors of Metalloproteinases

[1361] Known metalloproteinase inhibitors (metal chelators (EDTA, EGTA, AND HgCl₂), peptide metalloproteinase inhibitors (TIMP-1 and TIMP-2), and commercial small molecule MMP inhibitors) are used to characterize the proteolytic activity of polypeptides of the invention. The three synthetic MMP inhibitors used are: MMP inhibitor I, [IC₅₀ =1.0 μM against MMP-1 and MMP-8; IC₅₀=30 μM against MMP-9; IC₅₀=150 μM against MMP-3]; MMP-3 (stromelysin-1) inhibitor I [IC₅₀=5 μM against MMP-3], and MMP-3 inhibitor II [Kᵢ=130 nM against MMP-3]; inhibitors available through Calbiochem, catalog # 444250, 444218, and 444225, respectively): Briefly, different concentrations of the small molecule MMP inhibitors are mixed with purified polypeptides of the invention (50 μg/ml) in 22.9 pi of 1×HEPES buffer (50 mM HEPES, pH 7.5, 0.2 M NaCl, 10 mM CaCl₂, 25 μM ZnCl₂ and 0.05% Brij-35) and incubated at room temperature (24° C.) for 2-hr, then 7.1 μl of substrate alpha-2-macroglobulin (0.2 unit/ml) is added and incubated at 37° C. for 20-hr. The reactions are stopped by adding 4×sample buffer and boiled immediately for 5 minutes. After SDS-PAGE, the protein bands are visualized by silver stain.

[1362] Synthetic Fluorogenic Peptide Substrates Cleavage Assay

[1363] The substrate specificity for polypeptides of the invention with demonstrated metalloproteinase activity can be determined using synthetic fluorogenic peptide substrates (purchased from BACHEM Bioscience Inc). Test substrates include, M-1985, M-2225, M-2105, M-2110, and M-2255. The first four are MMP substrates and the last one is a substrate of tumor necrosis factor-α (TNF-α) converting enzyme (TACE). All the substrates are prepared in 1:1 dimethyl sulfoxide (DMSO) and water. The stock solutions are 50-500 μM. Fluorescent assays are performed by using a Perkin Elmer LS 50B luminescence spectrometer equipped with a constant temperature water bath. The excitation λ is 328 nm and the emission λ is 393 nm. Briefly, the assay is carried out by incubating 176 μl 1×HEPES buffer (0.2 M NaCl, 10 mM CaCl₂, 0.05% Brij-35 and 50 mM HEPES, pH 7.5) with 4 μl of substrate solution (50 uM) at 25° C. for 15 minutes, and then adding 20 μl of a purified polypeptide of the invention into the assay cuvett. The final concentration of substrate is 1 μM. Initial hydrolysis rates are monitored for 30-min.

### Example 66

### Characterization of the cDNA Contained in a Deposited Plasmid

[1364] The size of the cDNA insert contained in a deposited plasmid may be routinely determined using techniques known in the art, such as PCR amplification using synthetic primers hybridizable to the 3′ and 5′ ends of the cDNA sequence. For example, two primers of 17-30 nucleotides derived from each end of the cDNA (i.e., hybridizable to the absolute 5′ nucleotide or the 3′ nucleotide end of the sequence of SEQ ID NO: X, respectively) are synthesized and used to amplify the cDNA using the deposited cDNA plasmid as a template. The polymerase chain reaction is carried out under routine conditions, for instance, in 25 ul of reaction mixture with 0.5 ug of the above cDNA template. A convenient reaction mixture is 1.5-5 mM MgCl₂, 0.01% (w/v) gelatin, 20 uM each of dATP, dCTP, dGTP, dTTP, 25 pmol of each primer and 0.25 Unit of Taq polymerase. Thirty five cycles of PCR (denaturation at 94 degree C. for 1 min; annealing at 55 degree C. for 1 min; elongation at 72 degree C. for 1 min) are performed with a Perkin-Elmer Cetus automated thermal cycler. The amplified product is analyzed by agarose gel electrophoresis. The PCR product is verified to be the selected sequence by subcdoning and sequencing the DNA product.

[1365] Use of the above methodologies and/or other methodologies known in the art generates fragments from the clone corresponding to the approximate fragments described in Table 8, below. Accordingly, Table 8 provides a physical characterization of certain clones encompassed by the invention. The first column provides the unique clone identifier, “Clone ID NO:Z,” for cDNA clones of the invention, as described in Table 1A. The second column provides the approximate size of the cDNA insert contained in the corresponding cDNA clone.

TABLE 8

| | cDNA |
|---|---|
| Clone ID | Insert |
| NO: Z | Size: |
| HRACV26 | 600 |

[1366] It will be clear that the invention may be practiced otherwise than as particularly described in the foregoing description and examples. Numerous modifications and variations of the present invention are possible in light of the above teachings and, therefore, are within the scope of the appended claims.

[1367] The entire disclosure of each- document cited (including patents, patent applications, journal articles, abstracts, laboratory manuals, books, or other disclosures) in the Background of the Invention, Detailed Description, and Examples is hereby incorporated herein by reference. In addition, the CD-R copy of the sequence listing submitted herewith and the corresponding computer readable form are both incorporated herein by reference in their entireties. The specification and Sequence Listing of each of the following U.S. applications are herein incorporated by reference in their entirety: Application No. 60/179,065, filed on Jan. 31, 2000; Application No. 60/180,628, filed on Feb. 4, 2000; Application No. 60/214,886, filed on Jun. 28, 2000; Application No. 60/217,487, filed on Jul. 11, 2000; Application No. 60/225,758, filed on Aug. 14, 2000; Application No. 60/220,963, filed on Jul. 26, 2000; Application No. 60/217,496, filed on Jul. 11, 2000; Application No. 60/225,447, filed on Aug. 14, 2000; Application No. 60/218,290, filed on Jul. 14, 2000; Application No. 60/225,757 , filed on Aug. 14, 2000; Application No. 60/226,868, filed on Aug. 22, 2000; Application No. 60/216,647, filed on Jul. 7, 2000; Application No. 60/225,267, filed on Aug. 14, 2000; Application No. 60/216,880, filed on Jul. 7, 2000; Application No. 60/225,270, filed on Aug. 14, 2000; Application No. 60/251,869, filed on Dec. 8, 2000; Application No. 60/235,834, filed on Sep. 27, 2000; Application No. 60/234,274, filed on Sep. 21, 2000; Application No. 60/234,223, filed on Sep. 21, 2000; Application No. 60/228,924, filed on Aug. 30, 2000; Application No. 60/224,518, filed on Aug. 14, 2000; Application No. 60/236,369, filed on Sep. 29, 2000; Application No. 60/224,519, filed on Aug. 14, 2000; Application No. 60/220,964, filed on Jul. 26, 2000; Application No. 60/241,809, filed on Oct. 20, 2000; Application No. 60/249,299, filed on Nov. 17, 2000; Application No. 60/236,327, filed on Sep. 29, 2000; Application No. 60/241,785, filed on Oct. 20, 2000; Application No. 60/244,617, filed on Nov. 1, 2000; Application No. 60/225,268, filed on Aug. 14, 2000; Application No. 60/236,368, filed on Sep. 29, 2000; Application No. 60/251,856, filed on Dec. 8, 2000; Application No. 60/251,868, filed on Dec. 8, 2000; Application No. 60/229,344, filed on Sep. 1, 2000; Application No. 60/234,997, filed on Sep. 25, 2000; Application No. 60/229,343, filed on Sep. 1, 2000; Application No. 60/229,345, filed on Sep. 1, 2000; Application No. 60/229,287, filed on Sep. 1, 2000; Application No. 60/229,513, filed on Sep. 5, 2000; Application No. 60/231,413, filed on Sep. 8, 2000; Application No. 60/229,509, filed on Sep. 5, 2000; Application, No. 60/236,367, filed on Sep. 29, 2000; Application No. 60/237,039, filed on Oct. 2, 2000; Application No. 60/237,038, filed on Oct. 2, 2000; Application No. 60/236,370, filed on Sep. 29, 2000; Application No. 60/236,802, filed on Oct. 2, 2000; Application No. 60/237,037, filed on Oct. 2, 2000; Application No. 60/237,040, filed on Oct. 2, 2000; Application No. 60/240,960, filed on Oct. 20, 2000; Application No. 60/239,935, filed on Oct. 13, 2000; Application No. 60/239,937, filed on Oct. 13, 2000; Application No. 60/241,787, filed on Oct. 20, 2000; Application No. 60/246,474, filed on Nov. 8, 2000; Application No. 60/246,532, filed on Nov. 8, 2000; Application No. 60/249,216, filed on Nov. 17, 2000; Application No. 60/249,210, filed on Nov. 17, 2000; Application No. 60/226,681, filed on Aug. 22, 2000; Application No. 60/225,759, filed on Aug. 14, 2000; Application No. 60/225,213, filed on Aug. 14, 2000; Application No. 60/227,182, filed on Aug. 22, 2000; Application No. 60/225,214, filed on Aug. 14, 2000; Application No. 60/235,836, filed on Sep. 27, 2000; Application No. 60/230,438, filed on Sep .6, 2000; Application No. 60/215,135, filed on Jun. 30, 2000; Application No. 60/225,266, filed on Aug. 14, 2000; Application No. 60/249,218, filed on Nov. 17, 2000; Application No. 60/249,208, filed on Nov. 17, 2000; Application No. 60/249,213, filed on Nov. 17, 2000; Application No. 60/249,212, filed on Nov. 17, 2000; Application No. 60/249,207, filed on Nov. 17, 2000; Application No. 60/249,245, filed on Nov. 17, 2000; Application No. 60/249,244, filed on Nov. 17, 2000; Application No. 60/249,217, filed on Nov. 17, 2000; Application No. 60/249,21 1, filed on Nov. 17, 2000; Application No. 60/249,215, filed on Nov. 17, 2000; Application No. 60/249,264, filed on Nov. 17, 2000; Application No. 60/249,214, filed on Nov. 17, 2000; Application No. 60/249,297, filed on Nov. 17, 2000; Application No. 60/232,400, filed on Sep. 14, 2000; Application No. 60/231,242, filed on Sep. 8, 2000; Application No. 60/232,081, filed on Sep. 8, 2000; Application No. 60/232,080, filed on Sep. 8, 2000; Application No. 60/231,414, filed on Sep. 8, 2000; Application No. 60/231,244, filed on Sep. 8, 2000; Application No. 60/233,064, filed on Sep. 14, 2000; Application No. 60/233,063, filed on Sep. 14, 2000; Application No. 60/232,397, filed on Sep. 14, 2000; Application No. 60/232,399, filed on Sep. 14, 2000; Application No. 60/232,401, filed on Sep. 14, 2000; Application No. 60/241,808, filed on Oct. 20, 2000; Application No. 60/241,826, filed on Oct. 20, 2000; Application No. 60/241,786, filed on Oct. 20, 2000; Application No. 60/241,221, filed on Oct. 20, 2000; Application No. 60/246,475, filed on Nov. 8, 2000; Application No. 60/231,243, filed on Sep. 8, 2000; Application No. 60/233,065, filed on Sep. 14, 2000; Application No. 60/232,398, filed on Sep. 14, 2000; Application No. 60/234,998, filed on Sep. 25, 2000; Application No. 60/246,477, filed on Nov. 8, 2000; Application No. 60/246,528, filed on Nov. 8, 2000; Application No. 60/246,525, filed on Nov. 8, 2000; Application No. 60/246,476, filed on Nov. 8, 2000; Application No. 60/246,526, filed on Nov. 8, 2000; Application No. 60/249,209, filed on Nov. 17, 2000; Application No. 60/246,527, filed on Nov. 8, 2000; Application No. 60/246,523, filed on Nov. 8, 2000; Application No. 60/246,524, filed on Nov. 8, 2000; Application No. 60/246,478, filed on Nov. 8, 2000; Application No. 60/246,609, filed on Nov. 8, 2000; Application No. 60/246,613, filed on Nov. 8, 2000; Application No. 60/249,300, filed on Nov. 17, 2000; Application No. 60/249,265, filed on Nov. 17, 2000; Application No. 60/246,610, filed on Nov. 8, 2000; Application No. 60/246,611, filed on Nov. 8, 2000; Application No. 60/230,437, filed on Sep. 6, 2000; Application No. 60/251,990, filed on Dec. 8, 2000; Application No. 60/251,988, filed on Dec. 5, 2000; Application No. 60/251,030, filed on Dec. 5, 2000; Application No. 60/251,479, filed on Dec. 6, 2000; Application No. 60/256,719, filed on Dec. 5, 2000; Application No. 60/250,160, filed on Dec. 1, 2000; Application No. 60/251,989, filed on Dec. 8, 2000; Application No. 60/250,391, filed on Dec. 1, 2000; Application No. 60/254,097, filed on Dec. 11, 2000; and application Ser. No. 09/764,897, filed on Jan. 17, 2001.

[1368] Moreover, the microfiche copy and the corresponding computer readable form of the Sequence Listing of U.S. Application Serial No. 60/179,065, and the hard copy of and the corresponding computer readable form of the Sequence Listing of U.S. Application Serial No. 60/180,628 are also incorporated herein by reference in their entireties.

The application's sequence listing, which the Patent Office published only in electronic form, follows.

SEQUENCE LISTING (1267 sequences)

SEQ ID NO: 1 - DNA, 733 bp, Homo sapiens
gggatccggagcccaaatcttctgacaaaactcacacatgcccaccgtgcccagcacctgaattcgagggtgcaccgtcagtcttcctcttccccccaaaacccaaggacaccctcatgatctcccggactcctgaggtcacatgcgtggtggtggacgtaagccacgaagaccctgaggtcaagttcaactggtacgtggacggcgtggaggtgcataatgccaagacaaagccgcgggaggagcagtacaacagcacgtaccgtgtggtcagcgtcctcaccgtcctgcaccaggactggctgaatggcaaggagtacaagtgcaaggtctccaacaaagccctcccaacccccatcgagaaaaccatctccaaagccaaagggcagccccgagaaccacaggtgtacaccctgcccccatcccgggatgagctgaccaagaaccaggtcagcctgacctgcctggtcaaaggcttctatccaagcgacatcgccgtggagtgggagagcaatgggcagccggagaacaactacaagaccacgcctcccgtgctggactccgacggctccttcttcctctacagcaagctcaccgtggacaagagcaggtggcagcaggggaacgtcttctcatgctccgtgatgcatgaggctctgcacaaccactacacgcagaagagcctctccctgtctccgggtaaatgagtgcgacggccgcgactctagaggat

SEQ ID NO: 2 - protein, 5 aa, Homo sapiens
  misc_feature (3): Xaa equals any of the twenty naturally occurring L-amino acids
WSXWS

SEQ ID NO: 3 - DNA, 86 bp, Artificial Sequence
  Synthetic sequence with 4 tandem copies of the GAS binding site found in the IRF1 promoter (Rothman et al., Immunity 1:457-468 (1994)), 18 nucleotides complementary to the SV40 early promoter, and a Xho I restriction site.
gcgcctcgagatttccccgaaatctagatttccccgaaatgatttccccgaaatgatttccccgaaatatctgccatctcaattag

SEQ ID NO: 4 - DNA, 27 bp, Artificial Sequence
  Synthetic sequence complementary to the SV40 promoter; includes a Hind III restriction site.
gcggcaagctttttgcaaagcctaggc

SEQ ID NO: 5 - DNA, 271 bp, Artificial Sequence
  Synthetic promoter for use in biological assays; includes GAS binding sites found in the IRF1 promoter (Rothman et al., Immunity 1:457-468 (1994)).
ctcgagatttccccgaaatctagatttccccgaaatgatttccccgaaatgatttccccgaaatatctgccatctcaattagtcagcaaccatagtcccgcccctaactccgcccatcccgcccctaactccgcccagttccgcccattctccgccccatggctgactaattttttttatttatgcagaggccgaggccgcctcggcctctgagctattccagaagtagtgaggaggcttttttggaggcctaggcttttgcaaaaagctt

SEQ ID NO: 6 - DNA, 32 bp, Artificial Sequence
  Synthetic primer complementary to human genomic EGR-1 promoter sequence (Sakamoto et al., Oncogene 6:867-871 (1991)); includes a Xho I restriction site.
gcgctcgagggatgacagcgatagaaccccgg

SEQ ID NO: 7 - DNA, 31 bp, Artificial Sequence
  Synthetic primer complementary to human genomic EGR-1 promoter sequence (Sakamoto et al., Oncogene 6:867-871 (1991)); includes a Hind III restriction site.
gcgaagcttcgcgactccccggatccgcctc

SEQ ID NO: 8 - DNA, 12 bp, Homo sapiens
ggggactttccc

SEQ ID NO: 9 - DNA, 73 bp, Artificial Sequence
  Synthetic primer with 4 tandem copies of the NF-KB binding site (GGGGACTTTCCC), 18 nucleotides complementary to the 5' end of the SV40 early promoter sequence, and a XhoI restriction site.
gcggcctcgaggggactttcccggggactttccggggactttccgggactttccatcctgccatctcaattag

SEQ ID NO: 10 - DNA, 256 bp, Artificial Sequence
  Synthetic promoter for use in biological assays; includes NF-KB binding sites.
ctcgaggggactttcccggggactttccggggactttccgggactttccatctgccatctcaattagtcagcaaccatagtcccgcccctaactccgcccatcccgcccctaactccgcccagttccgcccattctccgccccatggctgactaattttttttatttatgcagaggccgaggccgcctcggcctctgagctattccagaagtagtgaggaggcttttttggaggcctaggcttttgcaaaaagctt

SEQ ID NO: 11 - DNA, 226 bp, Homo sapiens
ctgtgtgcgattgcggtkgatmgstacgatttctctttcacccatcaaccatccactatgcaaccatgattcattttgccaccgtccgcccttyccctcgttctcctttattcaactaccatctaccatccatcaaccatccttccataatcactcttctatccatccatccaccaataacattcaccctctgctggctgccctayttgaattccaagccgaattc

SEQ ID NO: 12 - DNA, 135 bp, Homo sapiens
aagtagggcagccagcagagsatgaatgacataagcgtgtggggtgccatgggaatgagctgtgcttctaggccagcttggacatcacacagtagcgatcaaccgcaatgacacacaggatccgaagccgaattc

SEQ ID NO: 13 - DNA, 74 bp, Homo sapiens
ctgtgtgycattgcggttgaccgctacgaattcatcctctgctggctgccctacttgaattccaagccgaattc

SEQ ID NO: 14 - DNA, 346 bp, Homo sapiens
  misc_feature (117): n equals a,t,g, or c
  misc_feature (289): n equals a,t,g, or c
  misc_feature (338): n equals a,t,g, or c
cggaaatatggactgttatctaaaattctgtatttcttcctaattaaaatgtaggcaataaatgaagcagagtgtcatgaactaatgtggaagttctcccagatgatgatgattganagaagaaaacagcagaacaatatgtttagtgtgacgtcatttacgtatgagagagaaagggataggaagggtaggagaaggcaaagcaagacaacgatcaattaatgtctaaatataaataaaaggataggcgttctggaaggaacgtcttttccctaaccattgtcaaggngaattgaagcaggaggagttcgaaaccaacctgaccaacatgtgaaacncgtctcta

SEQ ID NO: 15 - DNA, 415 bp, Homo sapiens
  misc_feature (398): n equals a,t,g, or c
  misc_feature (400): n equals a,t,g, or c
  misc_feature (408): n equals a,t,g, or c
gggataatttatgaagaacagaaatttgtttcccacagttctgaaggttgggggaagtccaaaatcaaggctccagcagatacagtgtttgataagttgccctctgctttcaagatggtcccttgtttctgtgtcctcacttggcagaaggaatgaacttgctcccttgagtccttatataaagtcattaatcctatccataagggtggagctagtatggcctaatcatctcatgaaagccccacctctttatttttaatttttggtagagatggggtctcactgtgttgcccaggctggtgtcgaattcctaggctcaatgatccttctgcttgggcctcggaatgctgtggttacaggtgtgagccacacctcttaaatcccgttggcatgggggntnaagtttcnaaaagga

SEQ ID NO: 16 - DNA, 535 bp, Homo sapiens
  misc_feature (372): n equals a,t,g, or c
  misc_feature (374): n equals a,t,g, or c
  misc_feature (434): n equals a,t,g, or c
gaaaagaaaagaaaagaaaacaggatatttattttagcttcttagttaacatcattaattttgtgtagttgagcgactcgttgactgcctcctccctgcagttttttacggtgcctccggctgtcgacaggcccgctgtgagccgcagtctgtgggtgcaagtgacaacagccgggcgggaggcggtgcactcaggcggcaggaaggtcccgagacggcgacgagaatgtggtcatgttcaggacactcgctcagggagggtcgttgtctgggattttacacgctcagcaccacctccttattctgttctcagggtgtctctgctgttggagttacggtctttcggttgtgtattaggctacagctatttantnaaatttgttcttgttcatattcttctttgtatataaacaaccctaaaagggttagtcagnaaaaattactaaatgtcatttgttgtattctctctgtatttttactaacatcattcagctggaaataatttcaaaaagaaataaaatacctttcccattac

SEQ ID NO: 17 - DNA, 377 bp, Homo sapiens
cccacgcgtccgtccttgggaatctagctcttctctagactcccatgatgattttttctgtacaccccccacgaagctctgcaagccttactcatcagcatccaatgcatttatttaacctatgccactgaccccagagcttctggagggcatcgtgtcatccttgccttttccctgcatacaaaaggcttcaatgaatgatggtctaactaaaaaaaaaaaaaaaagggcggccgctctagaggatccaagcttacgtacgcgtgcatgcgacgtcatagctcttctatagtgtcacctaaattcaattcactggccgtcgttttacaacgtcgtgactgggaaaaccctgggcgttacccaacttaatcgccttg

SEQ ID NO: 18 - DNA, 389 bp, Homo sapiens
  misc_feature (356): n equals a,t,g, or c
  misc_feature (359): n equals a,t,g, or c
  misc_feature (387): n equals a,t,g, or c
cccacgcgtccgcatgtgtgttgggcagcaggaaagacagagtaccacatttttaatatacttgacatttgggtctagcttgaggatagcttacaagatagtgacagccagaatatatctatttatagacaaaaaagcacatacttctttaatttcaaacttgagtagaagattgatgagctcctcatttgggacctctgcagcttttttaagttctgatcctttcatacttttacaagtctgtggttctccatcttcagcatcaaaatactcatcatcagactctaaaggraaaagacatttatttgatctgagacatgtacattgaaaactgcatgataacactcaaatctaantcnctaaaaagtgaaattccatttattaganga

SEQ ID NO: 19 - DNA, 559 bp, Homo sapiens
  misc_feature (371): n equals a,t,g, or c
  misc_feature (531): n equals a,t,g, or c
  misc_feature (544): n equals a,t,g, or c
  misc_feature (547): n equals a,t,g, or c
  misc_feature (556): n equals a,t,g, or c
cccacgcgtccgcccacgcgtccggtgagataggtaggcaagtgtggacaaagataaaactgaaaaaccactgcaaaggttgaggtaagacaccataagccgctgaactaagacaaagtcattagtaattttaaaatgaggrtgggaattaactaacagaactgataggaagtgttaacatacaacaggggagtctaagatggcttccaattttcacttagaggggtaagggtaccattaacttaagatcattaatacagraaaattaatcagatttggagtttaccaaggtttgcttttggttgtaacaatgatatatgataaaattaaatgrataaataagtgratgcactggtgaattaatgagctgntctcattaagaccagagtacttatttataacaaaagtaacttttccctttccctgggtacatcaaactgtactccacagataacagacaccagtgagtttttcatggttaaaaaagccccaactttgacctataaatgtggaccaagaaattaaaataanctggaaccagcgngcnacggtattngga

SEQ ID NO: 20 - DNA, 404 bp, Homo sapiens
  misc_feature (359): n equals a,t,g, or c
  misc_feature (364): n equals a,t,g, or c
  misc_feature (366): n equals a,t,g, or c
  misc_feature (388): n equals a,t,g, or c
cccacgcgtccgagcaatatttcctcattcttgctaaaccatcatggcacctttgcttacccatcatctcttattgcctttgtagaataagttaaaactgacttttattctctattttcatcccctagaaaaataagtagacaaactctgtaaccttatgtaactttacaatatttcatggatttcaaaggactgaataacaaagattgttaactcccaaccagaaaatggatcccctagagaaaaatgtttcatagatgcagatgctactttagcactatgraaatctgctggattttagcatgcctaaaatataattttacattggcctaaaatcaggaattcccctaccataaccnatagncnatggcgggaatttaccgggaancttggaaaaaaagggg

SEQ ID NO: 21 - DNA, 449 bp, Homo sapiens
  misc_feature (325): n equals a,t,g, or c
  misc_feature (403): n equals a,t,g, or c
  misc_feature (411): n equals a,t,g, or c
  misc_feature (418): n equals a,t,g, or c
gtccggaaaaaagcatgattatataaataaaagaaaaaagcaatgactactaaaatagaatataaaacaataaagaaaacctgtagtaaactaagaaattgttgagaaaaatattattggtattttcaaaaggcaaaattgaagtggcagtattaaaaaagggttgttgcacactgtgtatatttaaaaggcaaattagaaaaatggcttaattacctatgtagcttattcctgcagaagaaacatacctcaaaaatagaatgagtcaactcatggttaataaatacatcaggagaaacaggacattccagcatggaaagaaccnccttaaggaaacattgaggacaaactcccggactatggaaaagcccattccttgatatcggcacacagctccatttcnggatggtntttccanaaattatccaagtggccttagaactttaccc

SEQ ID NO: 22 - DNA, 384 bp, Homo sapiens
aattcggcacgagctgatttttactttgttcccatttataattcaaatataatataaacgtcttattcatttagtcttcagcattttaagtattcgacacgaacattaaagatttggtgttgaatttaataaattacaccaaaaagtctcagtagccaattcactaacatcttttgatttggtaatcttcacagaatcaacaactgttaacacttctgtgcaaataaatttcagttgtgcttatatattatartattcactttaggaatccacctgtcaatttgcaattcaattataaggtatattttaagtggtatctatgtattgtatacacatattcccttgaaaggtgwggataattaggaagtagtaatataaaatgtg

SEQ ID NO: 23 - DNA, 366 bp, Homo sapiens
  misc_feature (274): n equals a,t,g, or c
ttctccagctctccttctggcttcatcctgtcttccacggctctcctgtcccacctattctccctgccggtgcccaagttttagccttcactgccttcccctagaacacgccagggatattgcattctgtcctcactgtcttgaggatcttcctccccggctcatcactccccatggggcagctgccagggtaggcgctgtcaccttctgttgacaacagtcagtagctccttaaggactaaaactgttcagcccagcattcagctctttgganggagtccatctgtcccccagcacatccaggagtaaggattccgactggtcccattcctcatcctggtgtcttcagttctctgctgccagttc

SEQ ID NO: 24 - DNA, 340 bp, Homo sapiens
  misc_feature (217): n equals a,t,g, or c
  misc_feature (255): n equals a,t,g, or c
  misc_feature (304): n equals a,t,g, or c
tcgagtttttttttttttttttttttttttgtttttttttttaaaatattgaaatataaaatttattcaaaagcaaaataacagcttctatgaagtatgagctacatataataagtaaacagcacagtaccaaaaattccattttttcaacacatcagtatcttctttgaattacacattttctccctgatttaaaccagcacctgtttgcatagangactttttaatagtcttacttctttgtttatgtatctnagcatcccactaagcgtgttaaagtcattaatcctcagaactatcagcntctagggtatatgtgagggttaaatgagccggcggg

SEQ ID NO: 25 - DNA, 355 bp, Homo sapiens
  misc_feature (308): n equals a,t,g, or c
  misc_feature (320): n equals a,t,g, or c
aggttcaagccctgtctgtctcgaggcttcctcctccctcccgttccgcagagctgttctggcaggggcctggagtccagagccgcagcttcgtccctttcggggggcctcagatcgctctgctgctgcccttttcctctggagatctgcgagaagggtgaactgagataatggatgagaaagcatgttgaaaaccacagccggggcttttctctaaggttatcgagtacgtggttctcagggatccaagaacagtgatggacaaggcaaatgtgagccagtatggtcatcagtagctctatattgantatccagccagntgggcctaaagatacccgtttcaaaattactaggg

SEQ ID NO: 26 - DNA, 653 bp, Homo sapiens
  misc_feature (523): n equals a,t,g, or c
  misc_feature (597): n equals a,t,g, or c
  misc_feature (639): n equals a,t,g, or c
  misc_feature (651): n equals a,t,g, or c
gaattcggcagagtttgagttcaattactaccaagcacactttctggaattactactaaattgcaaacatattgtagcagttctaaagacgcttttttgagttaatgttcatcaatatttaaaaaatatttttctcagtattaaaacaagttaaaaataccattgataagaattcaggctctgggctgagacagctctcagtggaaatcctagctctgcctctgcaaagccatgtcctaaaataagctattaaatctctccaatacttgatttcctagattatgaaataatactacacactacctcagagaatcattgacagaattaaataagtcaggtaatgcattgaacacagtgcttagtacaacaaatgttactaaatgtaaacatttctacaatgatgagtgatgattctgttatgtacagatatgtactaccatttgctagtgkatcacaacagaatagaacacatcatataatatgatgcaagttatattaataacataatgctatgcatatattntgktatatccatagaaaattttaaccamattaatagcacagtgtgtggcctttactacactcaacaaawggtanttatataattaatatcattatacttacaatggctttcttcanggggaggaactntt

SEQ ID NO: 27 - DNA, 267 bp, Homo sapiens
aattcggcagagtgcccacccaccccacacgaccaccctctgtactccttggggccccacccacttcctggctttmaccatcattttytcctcatctcctgccccctgtctgcatcccaagctccacacctgcttccgggtagcagaagccccagctctgcttgtcccctggctgacatacctggagggttccaaggcagaagtggccagcccctccccctcagtatgggctcctccatcctctgtaggggaggggccatagcttct

SEQ ID NO: 28 - DNA, 323 bp, Homo sapiens
  misc_feature (91): n equals a,t,g, or c
  misc_feature (282): n equals a,t,g, or c
agccacagtgaaggcccttatcagccacctgtactgtgttcagtgcttctaagacacgaaccagatgaacgtgcacaacctggcaattgtntttgggcccacgctcttccagacagatgggcaggactacaaggctggccgtgtggtggaagacctcattaaccactatgtgtgggtgtttagtgtggatgaggaagagctcaggaagcagcgggaggagtggcctattaagagtctcaaagtctacctgggagtgaagaagaaactcaggccacccacctngttggggctttcacagtggtgcatgagacagaggaaacatg

SEQ ID NO: 29 - DNA, 247 bp, Homo sapiens
  misc_feature (225): n equals a,t,g, or c
aattcggcacaggatgaaatcaaacaaatgctttcgctgaagggctccatctttgcaaaaccgaacctaggacaatgtgcacgtttgtaactagcaattccgtagacagatcggggaggcagcatggaacttgattttctgtaatttaagagttgtcagtaaagtcagtgtttgcaggcattttcagtgttctgcagtgggcttcagttcggcagtttggcaggncaggtttccattagcaaccagt

SEQ ID NO: 30 - DNA, 184 bp, Homo sapiens
  misc_feature (171): n equals a,t,g, or c
ggcagaggtgaactgataagaaacagtaggaaaattagggagagcctgaatatgatctttaaaggcattgctgagctaagttagagaataatcactctttataatagcaaagacataaaatcaacttcaatgcccatcagtggtggmctggataaagaaatgtggtacatncacagcatagatt

SEQ ID NO: 31 - DNA, 327 bp, Homo sapiens
  misc_feature (317): n equals a,t,g, or c
ggcasagggccactccctgccaccccgtggaggacacccagctctccagccccttccctgtctctccagccgcactctgcaatgcaggggtctgtctcttcttctctggctgcggcccagwgcacagtgcctggcagagcagcagatgcccagtgtttgggggcaggagaccctggccactctgtacagcacagggatctgcatccagacagaccacaaaggagaaaactgggactggggtggcagcggcagaggacaggccagggcaaggcccacttcagaccctttgggcagcgtggaggaggaagaacaaaggncagggcaggg

SEQ ID NO: 32 - DNA, 640 bp, Homo sapiens
  misc_feature (605): n equals a,t,g, or c
  misc_feature (620): n equals a,t,g, or c
  misc_feature (622): n equals a,t,g, or c
ggcagagtttgcctgcacactcccagctatggggttgtggctcagtgtattcctttccccagaaggggagccacaggtccccccacagcttctcccaggagcagatcattcattgttgacacctcaacacccagccatggggtggggagctcaaggcatcctcccggcaggtcatcctgggctcccattgctccccagaagtggttccagcttttgtccctctacctcccagtctgcccctagccacaagctggcaattcagttcaggatccttcctgcaggaagggctacaagtgtgctgacaytacccgscatgtcccagccatgggaggagatgactcaggcgttcccccattaacttcagagggtccccaggtattatttttgcctatcctycagctagaagttaaaatgcaggaccttctagccaatagggaaaacaggtatactgsccgggcatggtggctcatgcctgtaatcaccatactttgggaggctgaggtgggaggatcatttgagcccaggagtttgagtccagcctgggcaacataccaagaccccatctcaaacataaataaataaataaaacaggtatactaacaacntgtccccaccattcntncctatgggggttcaatga

SEQ ID NO: 33 - DNA, 304 bp, Homo sapiens
  misc_feature (281): n equals a,t,g, or c
ggtcacgagggaaagccctgcactacctgagttcaccctcacaactcagtcccttctctatctctccaagcaggtagaaatgtcctggaagagtctggcctgaacaccaaaagggttcactaatgatttattgctatctcttcctataatcaaatcacccaaaattggttatctaaacccctttcctgtatctgaattggtagggaaactttgaaatttgggcaggtacatagacggctgaggggctgttctttatacagatactcagaggtaagtgcctncctcatgtccgtctttgacccaa

SEQ ID NO: 34 - DNA, 504 bp, Homo sapiens
  misc_feature (451): n equals a,t,g, or c
  misc_feature (465): n equals a,t,g, or c
  misc_feature (499): n equals a,t,g, or c
ggcacgagccctagctggccgtggggatcgaatattctacagggcacttcattctacagtgtgagcccgagctcccggtgcggagatgaggcctggggccggtccgctgcccctcgcccccgggcggggcccaagcaccgccgaccattcccaggcgttggggcccgaggcctagcgcggggcgtccggggagctgtggggagacctggggcggctgttttccgcccttgtaactcgtgatgagttcttccccctcgcttctgtctgcagagaccaataagactgcgggcccttctcctcaacccaggcgcccagccgtccctgggcagatttgcagtttggggaatgtgctcggagagttcccctccccatcatgtgccccttctcctagcggcamgtcacaaatcctggttcagaagtcctcccgggggccgggaaatmaggccaagtngtcgccggcggatncgccctgcccamatcgccaaggggggaagcaaangggca

SEQ ID NO: 35 - DNA, 455 bp, Homo sapiens
  misc_feature (399): n equals a,t,g, or c
  misc_feature (402): n equals a,t,g, or c
  misc_feature (418): n equals a,t,g, or c
  misc_feature (427): n equals a,t,g, or c
ggcacgagctgaggccgaaaggtgagggggcggggctgttcaggacacctggtctgtgtactcacggcctctatctaccctgttcaggggaaccccaaacctgcttttytttctttctcagcctctcctccctcctcacaccctggatgctgagagcagggcccagctctgctctttccacaacatttgggccatgttggcacagagcgggggcctcttgggctatggtggccacactccccgggctaactgagttacctgattcccagcggaaaggtcaggaagggaggaaagaaacttgctgagctacaaattcgagactgctggggytttctaggacaggccacyttcctgcaattgtccctctgtgtccccaactcccgcagtcccgcaggccangangtgggtgcctgatgancggtgcttnccttagatgatatgtgggcacccttgaa

SEQ ID NO: 36 - DNA, 727 bp, Homo sapiens
  misc_feature (501): n equals a,t,g, or c
  misc_feature (503): n equals a,t,g, or c
ggcagagggaagagtcctgtggcttctmagtccctgtggaggctaacgcaaagctctgtagaacaagccttagagtgcatgctctatggtctaatgagaaacttgtgtttgtgcttgcacacgtttcaatgttccctacaggatattttacaaaggtatgaaaataatggccaaccagaagctagtatcagtttggggcctaaatgcagcaggtgttcctgataagcagataagcagagctcttcctgcagtagcccaggtctcaccaaatgacaaatggctaatcaagacactcctgcaagcccttgatggtgagagctgcagagctgtttcttcagctgccatcaaggcaggacctcaggacctgactgtctacagtcagggaatagtgaacaatatgggatatgggtataggtaggtggtagacaagatcgtgccccatggctgatggsccgggtgtctcaggcaggccccctgtgcacagaaagagcytaagtgcananaagccaggcatctttcccctgtcatctgtggaaggggaatgtgatggccacagacaccctcatggcacagacatggccagcctctgacgttcctctgcatcagagtagttctgtcctcgaagccccagtcagcagagctggatgaccagattgcaagaagcaaaccagaaagtgtgatggcrgagatgtcagatcccgtttaataaacacttcagtaaacccaa

SEQ ID NO: 37 - DNA, 520 bp, Homo sapiens
  misc_feature (419): n equals a,t,g, or c
  misc_feature (450): n equals a,t,g, or c
  misc_feature (454): n equals a,t,g, or c
  misc_feature (472): n equals a,t,g, or c
  misc_feature (493): n equals a,t,g, or c
tgcagctaagatccgatcaggtgggcagaaactcaaatgctctacaaatgttcacttttgctgacttgaagtaaaaactgagtagtttttgcattagctgaaattttgggtttcagcaacagcatggatgatcagaatccaactgttatttctgaggagacaatacacctacaccagccagttctctgaaggcacccctccccttacccgctatctctgctgtttccagagccaagtatctgtggctgggaatcaaaccatctgggtttgagacctgcttttgccattgtcttttgtgtgaccttgagcaagtggctttttggtctatggacctccgctctgtagaatggyggctgggatttggctagctcagtggcttccctcagaggccagggaggcaatataaatatgtgaatgangagtgttagaactttttttgacagtctgganagtnaatgctaaacccatggcnttcagttttttaaaaacccancaacgccagggcaatggcttatacctg

SEQ ID NO: 38 - DNA, 424 bp, Homo sapiens
  misc_feature (22): n equals a,t,g, or c
  misc_feature (31): n equals a,t,g, or c
  misc_feature (96): n equals a,t,g, or c
  misc_feature (205): n equals a,t,g, or c
cccacagtgacctgagaaccancctactgcnactcccagcatgggtaacaaagtgagaccctgtccccaaaaatataacttaaaagggatgttcanacccaacctagaattttaggcccagccagaagtaatgtacaacagttgttttcaaagatgcaggggctcaaaaataagagtgatgccttacttaacgatgggtatacantctgagaaacacgcgggtgatttcattgttaatgtcagcctactacacacctgggtcaaaggtagggcctgttccattgctcccaggctactcacctgcacagcctgttactatactgaatgcaacaggagttctaacagtggtatttgcgtatctgtacacagaaaaggtacagtaaaaataaggtgcagtcacacactatcatacatgcaatacact

SEQ ID NO: 39 - DNA, 388 bp, Homo sapiens
  misc_feature (380): n equals a,t,g, or c
ggcasagcggcacagagccaagactccaaagatgcaagtcacgggscataaggaccaaataaagactcccattctcagtgacctggtgaactcagtgacactttcttaatatctgtcccagatgtaattgatgggatccttccaaagaagaaacaagccagattaacccagcctcctcttctgagraccctcaggcatcccaaaattacccttggccacttacgagtgcaaatctttgatgcagtcttctgcagtttccatccttcaagtggacatgctgcttcggttggagtagaggaacatttgttgttctgggtctgaagaacctgcccagttagagtggggaagatgttcatttgggaaatgggtgccccagggcntaggttat

SEQ ID NO: 40 - DNA, 323 bp, Homo sapiens
  misc_feature (202): n equals a,t,g, or c
  misc_feature (287): n equals a,t,g, or c
  misc_feature (306): n equals a,t,g, or c
ggcacgagcaaaaccatactggcctgccctgtcccccatcctgtgcccataaaaaccacaggccccaccagcagagcagcagagcagctgagaaagacagaagagaagaagtagctggacgttggagaaaagcagcttgacttcagagggacagcttgacagtgggaccttggaggamgagtttgaccagggatggccaaantccaggggaagaccaccttcccactccatcccctttccagctcttcattccattgagatccatttccattcagcattaaatcctntgggttttaccattttcanttcattgtgtggacctg

SEQ ID NO: 41 - DNA, 614 bp, Homo sapiens
  misc_feature (518): n equals a,t,g, or c
ggcacgagtaacaaattctgggactctacaaattgagtagatctgggatggggctctggaatctattttcaacaattgttccctggcaaataacatatggctccccagtgaatggagcaagaagataccatggagtagtttgaaacaggaacaaaatcttctgaaagctcggagcagaagcctttttggtcaacatggaggaaaaaagacggcgagcccgagttcagggagcctgggctgcccctgttaaaagccaggccattgctcagccagctaccactgctaagagccatctccaccagaagcctggccagacctggaagaacaaagagcatcatctctctgacagagagtttgtgttcaaagaacctcagcaggtagtacgtagagctcctgagccacgagtgattgacagagagggtgtgtatgaaatcagcctgtcacccacaggtgtatctagggtctgtttgtatcctggctttgktgacgtgaaagaagctgactggatattggaacanctttgtcaagatgttcctggaaacagatgaccggcatyagaaargtggcaccctgtgctgsgcacacttaagaaccgcatttgaaaaaaacactgg

SEQ ID NO: 42 - DNA, 560 bp, Homo sapiens
  misc_feature (499): n equals a,t,g, or c
  misc_feature (525): n equals a,t,g, or c
  misc_feature (551): n equals a,t,g, or c
  misc_feature (558): n equals a,t,g, or c
ggcacgagcacagcatgagggcgagaggtgagccgagggcaggggacgtggggtcatgatgtctcctaaaggaacttctcttattgcccagggcgggaggtttcacagcagccgtttcctgggtgtcctgctctcccagagtgctctgcagtattatccttttacctcaggccactgtgtagcaccatgtaaagggtcttatgcctttacattggcacgattggagcctttgaaacgtggttatgaagcaggcttgattttctgcatttttcagatgaaaaagcagagactggaggtttcctatcttggtcaakttcatgtgagctcgtaagtgaagaatccaggaactgaattcctgtccctgaccccaaattccttgctgggagggcttgagtggtgccctattccctacactatgaagtggagacagtgtgcagggccattctctgaaagccctttgtgcctctgggcctttgcatgtgcttgtctccgctgcccnagggctggcttctgttcatgcattangagccagcttgcagtgtcaccacctntgtgaangc

SEQ ID NO: 43 - DNA, 526 bp, Homo sapiens
gggagaggagcataggatgcggcaggagggcagtggaggctgaggtacggatttttaggcccgccttaccttcttttttgcccttagtgcccgtggccaataagagggacacacgctccattgaagaggctatgaatgagatcagagccaagaagcgtctgcggcagagtggggaagagttgccgccaacttcttaggcgccccgcccagytccytttgacccytggggcarggcagggggcagggagagacaaggytgctgtattagagcccatcytggagccccacctttgaaccacytyctaccagctgtccctcaggctgggggaaaacaggtgtttgatttgtcaccgttggagcttggatatgtgcgtggcgtgtgtgtgtgtgtgagagtgtgaatgcacaggtgggtatttaatctgtattattccccgttcttggaattttcttccccatggggctggggtactttacattcaataaatactgtttaacccaaaaaaaaaaaaaaaaaaaaactcga

SEQ ID NO: 44 - DNA, 332 bp, Homo sapiens
ggcacgagggaacattcccctttctacactctcttccctaaaaagattggttcaaaaatcccacagaactcttgagtgttagccatttgctttaaatcctaccatgtcataccttgtcctttaggattatgcatttgtgatagaggagggcatgggagaatgaaacacgtgtggccgtttctctattactcagacctcagggcaaacaagtacatcggaacttttctgaagggtgggctttgcttgggagaggtggagtgtgagggtgccagggcacttgttgggttggcgggcaccccaggaaaaaaatgtagcaaggacacaattgtggg

SEQ ID NO: 45 - DNA, 312 bp, Homo sapiens
  misc_feature (279): n equals a,t,g, or c
  misc_feature (299): n equals a,t,g, or c
ggcagagcgggggttagagatcctaggccccaagcccacgttctggccagtgttccgggagcagctctgtcgtcacacacgcctcttctacatggttcgggcacaggcctggagccaggmcatggcagaggaccgcagagcctcctgcacctgagttctagactcaacggtgctctggccaggagcagaattttgctgaccgttcctcctgatgacgaggtgccaagtctgggaagactgtgggaggcctggtcagccgtgtgagacataactccctgngagatgatagccctggttgntgtggacatactg

SEQ ID NO: 46 - DNA, 369 bp, Homo sapiens
  misc_feature (330): n equals a,t,g, or c
ggcagaggtctgttctctgagaataactctgctctccaggtattgtcagtgagaattcttggccaggggaaryggmttstkttccagggaataaaaaacatacacaggagtragcactgccgagaggaccgtggggtgaggtggcttcagggaagwgtcaataacaagtggagagttagaaatgtaggcttgtatataggaaatctttgtagctccaattagaggcagaatatagrttcagcacagcaggcagatctgaaacacttgccactgtatttcgcttatttcatgccagtttcacatgattttagccatatccacggggcaggnaaaccgggtttacaattaacactaatttagagtgtcttt

SEQ ID NO: 47 - DNA, 346 bp, Homo sapiens
  misc_feature (296): n equals a,t,g, or c
  misc_feature (302): n equals a,t,g, or c
  misc_feature (334): n equals a,t,g, or c
ggcagaggcgatatatacaagagtaatacctactacctcctttaatgagagaattgaatcagatggtgaatggatcaccctctgttcagtgcccagccccaaacagatgctaattaaatggsttaatcaaaccagctcaggctgttactggatgtcatcccttggcacrgtctggacatttcttgattcttgttgaacagccctatgaacaatattgtcataaggaaataggaaaacatcattttctttagggaccaatttggagcccatccatgaactgtcttccagctcctccngggttncccctgtcaacttggaccttcagggaggcctngttttctggttg

SEQ ID NO: 48 - DNA, 685 bp, Homo sapiens
  misc_feature (76): n equals a,t,g, or c
  misc_feature (140): n equals a,t,g, or c
gaaaaagccttatgaatcaagtgaatggggaaatcctttagccgcaaatctaacctcatcgacacggagagtccanctgaaaaaaggccttaatgtgaaggaatgtgctattcctttaatcagtataatagcactggagnagactgtggtagccatctccgtaaatttaaactttgagcacccacagtggggtattcttcataagtttcaggtatgtgggaagctctgaggaggttcattgtaatttctaatctgccgaggcctatagcctgatttatgtcactgccaatttctgaggctgaagccatttcacatttcacccctaccacctggcaggtgcacaccatgtgcatgagtcacttccccacagtgctcagagaagcaaacctctgtactctcccatttgcttggggaaattattaatagcccaagcatgtagggtcttcatgtcttttctctgactttagagtatacacctgacccagttgtggtccagagaatctgagttgtgctgtcagctttctaaggattacytttttaaggaacattgtcggtctcacatgatgcttgtaatgaatttttccacattctgattcaccagcctggaaactgcttggtgcacattgctttaatttataatgtttttataaaggttttaaaaaaatttacgcacatttaaaaaaaa

SEQ ID NO: 49 - DNA, 584 bp, Homo sapiens
  misc_feature (545): n equals a,t,g, or c
  misc_feature (554): n equals a,t,g, or c
  misc_feature (573): n equals a,t,g, or c
  misc_feature (581): n equals a,t,g, or c
tacgagttttttttttttttttttggtgttaactactctgcagaatgtctctacctttgtttctgatctgagatgtcagtgcttttttttgttgctactaatgttatgcacataaggtttgtaacttcttagcccaagccaaagttctatggcagctttggtggacagttctcatatggtttgaggtctttctacctcaagttcctgagtttctctgcctgaatctcttctctggccagagaagcatgttcagcctgagtatgggatgggctggagtgccagggaggtaattctccaagtaaaaccctcaagcaacaaagggcagtaattgggagacagacatcccagtttccttgatcctgcatgggacaattctaaggtgtgtttcatgggctctgagagggtcccagcaggactgagtgcagttgcccacaggagtaactttttcaataatatcctccttattgacttttctcatcctatgtcttacctgcccctaatttccgaggtcaattcccaaaggaattactggcacccaagtcctnttcctcagncgtcactaactaagcatanctttgggngaa

SEQ ID NO: 50 - DNA, 337 bp, Homo sapiens
  misc_feature (12): n equals a,t,g, or c
cgacggcccggnctgaagtccatcttaattctccttttcctcacgtcctaccatacctgtttgtcgagcttgctatgttgtcacataaacatttcttgaatttgtcctttcacttccatctcctcctctcctgcctcagtttctcgtgggttgtcataatattagtagctttctcagcagtctgcttggccccttcctcttcccacctcaaggctgttcttcacactgaccaattcctccaaaatgccaacgtgatcatgtcttaatacagaaatgacttaagaggttccacggcacttgcagaatacaagttaagatcttggtatgacctgtaagg

SEQ ID NO: 51 - DNA, 186 bp, Homo sapiens
gactggccttgtgtctgccacacctgtcactgcctatccttgtccagggggggccccatcagcccctcctmagctgcccagcaaagcaagcagttagtggggaggggagggaaacatggagcgggggccggtggtgggggcaggactgggggccggggccgaatccaggcactgctgggctgcctg

SEQ ID NO: 52 - DNA, 323 bp, Homo sapiens
  misc_feature (252): n equals a,t,g, or c
  misc_feature (277): n equals a,t,g, or c
  misc_feature (321): n equals a,t,g, or c
ggcagagtttacatgagcctatttccttaaaaaagatctttttgggaacttcattgataagcaatgaaaacccagtgacctatttatcctggaatctcattaccagaagccctttccagcctcccaactagctgggattacagggcatgcgccttcatggctggctgaattttgtatttttagtagagaccgggtttctccatgttggtcaggctggtctgggaactcccgacctcaggtggatctgcccgnctcggcctcccaaagtggctggggntttacaagcgtgggccacccaaggcctggcatctattttgtatnat

SEQ ID NO: 53 - DNA, 259 bp, Homo sapiens
  misc_feature (237): n equals a,t,g, or c
aaaaagctcccagtcgatggcaccagccctcggccttggcaggacataagggaccctcaggctgagccaacatcactgtccccacaagaataagtctttctccactgctggttccaaaagacatgcgtgacgggcaacaaaagccacattggagagtgcagctgtgcttgaagggtcgttcttggttcatttatggggtagcggggcggggggaagaggaggacagagtgactcttnatgaactctcctgggttgtttt

SEQ ID NO: 54 - DNA, 466 bp, Homo sapiens
  misc_feature (452): n equals a,t,g, or c
  misc_feature (456): n equals a,t,g, or c
  misc_feature (461): n equals a,t,g, or c
ggcacgaggagccccagaaaaaaatgttaatatgcaggaagaggcaaaagggttgagtttctgactgttgctaacctcaccactgcctttaaaaccaatcatgaggcacacggctgatatttaatagcttttagctgattatttttcttctcctcctctttcttttctatccaagttgacctgggtgtacttgagtggaaatgaagtcatccaaatgctgaattagaataatcacaggcctctaagaatgaaatggaagcagagattaaatggcggagggaaagccggcattaataaggaccaggaaaactttgcataaaataaataggagatggaatagattgaatttgtatatgctgcttccatttcttcctccattttgtgttgkcttctaagtcgagttactggcaaagtgggatttgatttgccacaaggactcataccttctgaanctangtgangggcc

SEQ ID NO: 55 - DNA, 398 bp, Homo sapiens
ggcagagcagttgatgagtcttcaccctgatgctgcctctcccatgcatgactcagtcaacttctagggcagtgattctctcctgggcaattttgcctcccaggggaatttggcaatgtctggagacactttttattgtcatgactggggagttgctactggcatctggtgagtagactccatggatgctgctaggcaccctacagtacacaggacagcccctatgacaaaatattatccagtccaaaatgtccacagtgctgraggctraggaagcctcttctwargaggatkgycctcccaagctgrtcgystctttttccttcaccaactaarggytttacctgttacctaaggaaatttcaatttgggtttttttggaacctgatatgggttca

SEQ ID NO: 56 - DNA, 420 bp, Homo sapiens
  misc_feature (327): n equals a,t,g, or c
  misc_feature (389): n equals a,t,g, or c
  misc_feature (414): n equals a,t,g, or c
gttggcattccagccctggaggtggcttctcagccatcccagcccgtccctgaccccactggcttaaagctcagagaggccttccccaccccggatcccatccactgcagtctgcaccccagctaagcttggctttcttcttctcccccaccctcttccacgtggctcctgactcctcagtcactagaggatcttgaagaccaaaaacggaaaaagaagaaagagaagatgggattcggctccatctcccgcgtcttcgccagagggaagcagcggaagtccctcgaccccggcctctttgatggtaccgccctgattattacatanaggaggacgcggactggtgatacgcgctcccctgcgcctgctgccgcaagcgtgtctgtgcntgtggcctgtgtgcaagcgaaacgngggtgc

SEQ ID NO: 57 - DNA, 636 bp, Homo sapiens
  misc_feature (616): n equals a,t,g, or c
  misc_feature (626): n equals a,t,g, or c
ctttcccgggatttcggggatgacacgggggccagtggtcctgtctggtgtgaaccgtcagcacagatggcctcctggagcttccccgagtcgttcgctgggggaagcgggcggtgagcggccagcccgggcgctccgcaggccgcgagctcccggcagggctggtggcgggggtccgcctgggggaggaatccccgcctgctccatcggacccggcctggcgcggctcgcggcgctcggcgggctcccttccattctagaatcttcccgcttgcttcccagcccgcgttcttccgcctgcctttaattgtgtaagtttgacgaagtcagagctttgggttccaggaaaagcgcaggagggtcatagaggaagggagggcgcaggttggagtcaggtccaaacagtccctatcgccacttttgaaaaaaaaaaaaaaacaacaaaaacccttaaggttggttttattttgccttttggtarcgggcgtattcatttasatttttttttcaagacaggcaaataaaaggtgtttgaaatctctagttatcccgtttaacacacccatcgatggcgcttttctagttaagctacgggggaaacgtctttatcccgcanttaggctgcnaacttgtgca

SEQ ID NO: 58 - DNA, 216 bp, Homo sapiens
  misc_feature (197): n equals a,t,g, or c
ggatttgtgtaaccaccagcacacaaatggtgaagacacagaaccattgcatcagtacagttctccctcatgctgtctctttgcaatcacatccacctctctgctcttccacttctctcctggcagccactactctgttctctatctctaatgttattgaaagaatgttataaattgaatcatagagtatgtgactnttttctttttgagacagag

SEQ ID NO: 59 - DNA, 610 bp, Homo sapiens
  misc_feature (519): n equals a,t,g, or c
  misc_feature (526): n equals a,t,g, or c
  misc_feature (596): n equals a,t,g, or c
  misc_feature (603): n equals a,t,g, or c
gccgcctctcccctacccggagtagcagggctcccgcagttagccatcccacagctctccaggggctctgctctctcgttaccaagaagcacatgccagcccgtctcccagcgtttcctggtcctttcacaatagacagatggggatgctccaggtagagacaaaagagaacacacaatccatacgctcatcttgctggtacccttccgctccctgagcccaaagaggagaacccagccctctgcgtaggaagaacacatttcaaggcatttactgacaagtaggtatagttactgcatacacatgtggaggctgcattatatcaaaaccgtaaataaacatagactctgcacactccttcaggccccaccatgtatttatgaatgggattgcttcatcattttcttttaatgtcagtagcasggaagtcagaaagcattacctctaaaacggggacagaacattgcaaatcwtcatttccaaccagctgkggcaataaccagcaaacmaaattacttnaccccgntgtatgggcccatgctatgggatttttcctgagtttctgattataacaatcctttttgaaggcctaaaangttaggngagaata

SEQ ID NO: 60 - DNA, 505 bp, Homo sapiens
  misc_feature (497): n equals a,t,g, or c
aaagaatacagagtaaactgttaagcactatatacatgtttgtataatcagacgattgttttcaaaaagtagtaatagcacaccctgagcggttagagttgctgatgaaccttgcctgttttcagggattgcctccttggtggagcatcatgagtccagttcacttgtaaatagaaccttccctggttctttttgaatttagggctactggtacgagctcacgcccggtgggacccaggggtttcacagtggtctccaacttcgggatttctgacaagctcctaatacagtttatttaaaaaaaaaaaaaatcctagagtggttgagttgccttctggggaaagcctggtgggggtgcgttggtgccttgggatgagcaggactttgtgcccgccccgtgtgaacttttacttcctgacagcaatagakatggacttgcctgtgaggtcgggagctgtatgctggggactgcaaaggccatgccttggtatggctantggccata

SEQ ID NO: 61 - DNA, 413 bp, Homo sapiens
  misc_feature (248): n equals a,t,g, or c
  misc_feature (362): n equals a,t,g, or c
  misc_feature (401): n equals a,t,g, or c
  misc_feature (410): n equals a,t,g, or c
ggaactctcaggggtccgcacggctgtcacaatggcagtaatgtgtgtggctggcttattcttcatccctgtagctggcctcacgggatttcacgtggttctggtggccaggggacgcacagccaaaaagcccaacctggtgtctctgagacagaagaagtggccttgcagccattactgacacccaaagatgaagtacagctgaagaccacctacagcaaaatccaacgggcagcccaagagcttangctcagcctcccctggcccaggccagccacctctcagtagccccacgaggggaggagtcaagaaggtgtcaggggttggtggtaccacctatgagatttcggtgtgagccttcngcacctccccttcccaacgcctctgcgcctacaccaaanggccccatntgg

SEQ ID NO: 62 - DNA, 527 bp, Homo sapiens
  misc_feature (463): n equals a,t,g, or c
  misc_feature (502): n equals a,t,g, or c
  misc_feature (517): n equals a,t,g, or c
gtaaaagagtaagtttttgcaaggcttgaatttactttggaagaacttagactactaccctcattcttctatgaggaaaaattttgcatcattaccgaaatggtgttttttgtttttttttttttaattttcagagtatctccccatacggattttgaatatcataaataccctgtgagataggcaggacagctataattagtatcactttagagattaaaaaacattgatgctctgagagttcatctgctgcctgcacatcgctgctgagtgctggagctggcatttgaagctggtcttcaatccgtggggaaatgctcttcccactattccatgctgcctcacctaggtcacccagaccctagaaatgtggtttttgatgcctctcatctgtatctgtacttgggaccattcttgctttggaatttttctcgtcttttgctctgccaaatatgaatatcanatagcttaccaaaatcatttttttaagctagcaaagcanaacaatatttaaagnctcttctgca

SEQ ID NO: 63 - DNA, 353 bp, Homo sapiens
gcaatgatcctgcagcagcccttgcagcgaggcccccagggaggggcccagcgcctcccgcgggccgccttgggggtgacttggggcctggacgccaggctgcctcctgtgtcagtatcccagcctgcctctctgccatctctccccagggagcctctgcgcaagcagtttctgtctggggagaacatggccacccaccttccttcttccccacaacagaagagaccagcgactcccgcaaagggacaaggttcctccctctcctgcagagtaggcatctgggcaccaagaccttccctcaacagaggacactgagcccaacggagttctgggatgggaggggtgggagcatg

SEQ ID NO: 64 - DNA, 545 bp, Homo sapiens
  misc_feature (475): n equals a,t,g, or c
  misc_feature (477): n equals a,t,g, or c
  misc_feature (489): n equals a,t,g, or c
  misc_feature (522): n equals a,t,g, or c
ccgaggggccgtgggaaacgtctgacgcccacttcacggaggagcaaatggaggcccaggccgtcattgtgcacggacacaccataggccgtacagagccgggagtgggaccctcgcagtgtagcccagagcccccaacccccaccagtggggagctcctgcatcatgtgatcgagcttgtgcataaataaagcaggagtttctacacaatcctgtgtggtggaatctcggttagctctgaggaataaaaggacacaaatggagaagttctgtgggtgtggtgttatccttccacgacagccacattaaggaacctgctgctgagaaaatgctgccttacagatgaaaacaaacttctccatccctttgtctttggtcagtacagaagaacatggttttatatcacaacaattgaagttccagattcttccattttgaaaaaggtgactyawttttctattggcctgaccgccananattttaacccanagaagtatsctgcttyactaggatattgggtanaatgwcctgaaacatgggaccca

SEQ ID NO: 65 - DNA, 528 bp, Homo sapiens
  misc_feature (417): n equals a,t,g, or c
  misc_feature (445): n equals a,t,g, or c
  misc_feature (452): n equals a,t,g, or c
  misc_feature (460): n equals a,t,g, or c
gttctccctcctgcctgccctcttgcacttcctctcccagaacccagcactactcccagaggctctgagctggagccctagaaggaggcgctgcaaggctccgtgctcctggagcttcgagtctatggtatgagttaaacagaagggtatctcctccatcagatctacaggagggtgtctgctccatcagacctggagyttccaaggcattttacccgaagctccagcacctggcccaaggctgggctgtgctgtgtcctcagtgaaagaatggatgagtcacagctgaatgatgaagagctgaaccagtaggtttccctggggtttccacaggcagtttcagcccaggggargacccagggagatgagggccacctgcaggacgtgtggtgtggaggcagcagctggggcaggganttgttgatgtctgaggccggccaccctntgtaacntccttatncttcagtttcaggggcctccctgttcattagccatgttgcacctgtgacgggacaaagcattagcagt

SEQ ID NO: 66 - DNA, 722 bp, Homo sapiens
gctgccttctcctgtaagtgctcccccagaacgtggcaaggcaggcgtcttcctatccgtgtgtgtctgagttgtgtggtgggcagatggggctcacccccaaaaaaggacccttatctgtgaatcaagaggcaaaagacacatcacaaatgtgccaaagaatcgtgcctcacttttgccttgttacaaaagtatgcttgctcctgaaagacagcatctcatttcggaaccccaggatttaaacggagcattccgtctccatgatcagtaccaaatgtttgtgaaatacacttatgcattcatgtggttgtttattcattcagcaaacagaatgaatacactctgttaaacagaatttagcagaaaccgctctggggaaggcactctgtggggtcctgtggatacaagataaaggaggtaccagcccccatcctcaagggtggcgtggccgargtgcagaggcagttgggtgacaaacgatggcagtacaaagagaaggcatgaggcagtgagtggcaagaaacacatgccctggggccagatgtctgggtgtgaatcgggctctgctgctcattagctgcgtggcttctctcaggcaagctgcttgacgtctctgaaccccagcaatctcatctggccagaggggaggcattgaggaggggtgagagactcttctcagattttattgactcctccatgctcttctctggtgcaacaggatg

SEQ ID NO: 67 - DNA, 541 bp, Homo sapiens
  misc_feature (520): n equals a,t,g, or c
  misc_feature (523): n equals a,t,g, or c
  misc_feature (538): n equals a,t,g, or c
  misc_feature (540): n equals a,t,g, or c
gaaaaaatcccattaccacttaagtcaggatgtggggacatcatttgtcctgcctggttcctggacttggtgttttgcctggactgtcttcgatgctaccttatgcagtgcctctcaggcctcatctctgcctactcattctgcatattggcagccctcgtgtcctttctcctggtgtccttgttactgcccccattacaatcagccatgtgaacaaccccaatatcaccatgaccatcaatacctggtaaatcctacagttacagttataagttcccattgaaaagaagttgagctctcttaatcagtttagagaaatatgatcacacttttgaaataacagatggttttcatctcatttgtcaactttgatcgattgacaatggctgcttgaagtgctgcatcaagaagaattctggcacacctgtgaagatggctactatcaaagcagaaaataacaagtgttggtgaggargtggagaaattgcaacccttgtaactgtacattgctggtggaaantgntgaaatggtttcaancnt

SEQ ID NO: 68 - DNA, 416 bp, Homo sapiens
  misc_feature (352): n equals a,t,g, or c
  misc_feature (398): n equals a,t,g, or c
  misc_feature (412): n equals a,t,g, or c
  misc_feature (415): n equals a,t,g, or c
ggccagtctggaggcgcactgtcaagaagggatgcgtctcctcgcccttgagaaccagcgcggagaccttcttttgtgcctctccttggctgtgaactttcccgcgcgggcaccaagaggcaccctgagaactcagaggacccagaggctcccctcaagcaaattccctgctgaccctggacaccccttgaaggagggggcaagaggctgccacaaggctcatcttataactcccagcaaggacacctggtgggagagtctggtgagatttggaggcagacttcctctactcacaaaacctatcccctcctagggcacccttgacattcccctaggtgggcctacacattgntcagaacctgtcccctgtaccaaaataaatataaatgaagtttggntctttaaaaaaaanaana

SEQ ID NO: 69 - DNA, 403 bp, Homo sapiens
  misc_feature (360): n equals a,t,g, or c
  misc_feature (362): n equals a,t,g, or c
  misc_feature (390): n equals a,t,g, or c
  misc_feature (391): n equals a,t,g, or c
gctttcaagtcctgtacataaagaagcatacaaagtatcatagacccagggcctaaaatgaagtcaagccaggaagtacaggatgtggggtgtgaacatgggtgtttttaatgtaatgggaaattagggcttggcctgcatacattgttcctttgggtcacatttgttaactagtgtcagatgtactcattatattaggggttatgagagctaatagaaatattttaagacagggaagaattacctttattacctgtcttctctggcctgcaaggccaaataacagtttgtaaccacacctgcccggaaggcagcacagatctgtgtagtagcagcttcttcccaaccacttgtaccatnanggtgacagtgtatccgtaagcccacgtnnaaattcccaatt

SEQ ID NO: 70 - DNA, 432 bp, Homo sapiens
gccgatctcaggcggctgggctgcgctggggctgagcggctccagcccaggctggggttgtgtgagcagcaggagcattcttccaaggtaatgattaagctgagtgcctggcaagggcacgggctgagagcacagaaggtgagccctattcacacctcggccaggctgcggtggccaggactggtttgggaaggcagggccccggtgtgcagccacagccagcagcctcctacctacacaagggtgttcgggagcatctcagggccgaagactttgctgcctgccctgccaggactttgtcctcacccctggcaccatgcacttcaggtgttctggactgggctggaatacacctgccggctccttgggcataccactgttgcagtgktgatcggcgtgggcactgaraccttcttcarggccagttaaaaa

SEQ ID NO: 71 - DNA, 560 bp, Homo sapiens
ggtcgctcgctctaacgagccggcgttgccgccaggggacgctcgggccgcaggaggtcgctgggtcgtgagctggcgccggggacgccgagcgactgcggggtttccctcagcgtcctgctatccggctgcccgccgcgctccttggtagtgtccgtgggcgcgcaggccttgaagaacctcctcgtggcgggaccccgagcgcaggagaggtgtcaaagagctggcgcgtctccagagccccgggaggaaggctgtaacggcagccccatcgtagacagggacattcgcatcccgagccctggatctctgaaaaccagcccagaatttggaagctggaaggaactttagatcgtccattctgagtgtctctcttcgctggcgttttcccactgaggttatgtaaacatgaagaggagcctacaagtgtcaaggaaaaaacgacagctaaccacagggcaggccatgggcaagatatctcagtgttctccgctctcataggtcagagtgagactcacctaggctggactgcaatggtgcaatatcggcttcactgcaac

SEQ ID NO: 72 - DNA, 414 bp, Homo sapiens
  misc_feature (383): n equals a,t,g, or c
ggccaggtgacccagggaccccacccgaccctgggctctaggacatttcaatcccattctgattcacagaatccgttcattgattttcactttcatttcaaacacgaaattaagtgcagctcagcctgagttcatcccattacacaaatgcttaatgaactgtgcagaccgcggcaggggagaggggcgggaagatgtttgcctgccgggccccagagcaggactgagtaaagagggtttgacagagctgcaaagtttgaaatgctttttgagaaatgaaaactgaagggtacagtgagagtgaactcaaggtcatgtgggctgaaaggctgctgtggatggcttccttgctggatctgtctctctcctttatctactttganaacttctgaatactttaamccctgctgctct

SEQ ID NO: 73 - DNA, 444 bp, Homo sapiens
  misc_feature (341): n equals a,t,g, or c
  misc_feature (380): n equals a,t,g, or c
ggcgagaccagccctgctccgaggctttgggtgcccccaacccctgcccacctgtgagagtcaccccccggagtgggttggagtttctctgartgtggtgtgtatgagtttgactttggcgatgtcaggataatttggtctgttttcaacacattctggaaagcaccctgagcatctgaaggatggaaggattgggctttaaatcaagttttttcagtccccattggttatcttaaggggcgtttgactttaacttgattttctttttcccctgtaagtccctgacccagaactgtgatctattttctttwgtgttttcagctgttgagcatgttgggcantacggagtgtagctacaactgtgtgaccccacctgtgtnactgactccacctgtgtgactccagtcgtgtgaccaactacaactgtgtaactgactccaattg

SEQ ID NO: 74 - DNA, 351 bp, Homo sapiens
  misc_feature (312): n equals a,t,g, or c
  misc_feature (334): n equals a,t,g, or c
  misc_feature (347): n equals a,t,g, or c
gggggagccactcaagtggaactggggcctgtggcccccggcaggtcccaactctggcccaccaggccttctggcaattgcttctccgcgcaagacaccaaggccaggtcgtggggtttccctggtagctcctcgaggggctctgggcagcaggtctgggggtggcggagctgggaggccatgtcccccagccggccgtgcttcctcctctgcaggcgggagtgggagactcgtctgcaggaaacgctgggcccgcactatgtgctgctgtcctcggcggcccacggcgtgctctacatgtcgctcttcatntcgcaagggacctcatcttggntctgcttaaaaantgga

SEQ ID NO: 75 - DNA, 448 bp, Homo sapiens
  misc_feature (399): n equals a,t,g, or c
  misc_feature (400): n equals a,t,g, or c
ggctgcccaggccttgtgcagcgggcagcgagcagcccagggagccaggccccagacaccgcactcagggccatggccgacaggggcccgtggagggtgggcgtggtgggctatggccgcctcggacagtccctcgtctcccgcctcttggctcagggaccagaacttggcctagaacttgtttttgtctggaatcgtgacccaggacgaatggcagggagcgtgcccccttccctgcagctccagaaccttgctgcccttggggaaaggcgccctgatctggttgtggaagtggcccatcccaaaataatccatgaatctggggcacaaatyctgcgccatgccaatctcctggtggggtccccctcagctctaagtgaccagaccacagagcggcanntctggaggcctcacagcactgggaccacgccgtgtttgtggcccgagg

SEQ ID NO: 76 - DNA, 512 bp, Homo sapiens
gctgccacggggactgaagatggcgccgcgaggtgagattccggaggtaaacggttgtcctccaccccgctggaaatcctgttctttctgaacgggtggtataatgctacctatttcctgctggaacttttcatatttctgtataaaggtgtcctgctaccatatccaacagctaacctagtactggatgtggtgatgctcctcctttatcttggaattgaagtaattcgcctgttttttggaaaagcagaccatttggagatgactccatgggctgtgtctgacaggtacaaagggaaacctctgccagcgaaagatgccactcagtattagcgtggccttgaccttcccatctgccatgatggcctcctattacctgctgctgcagacctacgtactccgcctggaagcccatcatgaatggcatcttgctcttcttctgtggctcagagctttwacttgaagtgctcaccttggctgctttctccagtatggacacsatttgaagtaca

SEQ ID NO: 77 - DNA, 222 bp, Homo sapiens
  misc_feature (172): n equals a,t,g, or c
gccctaatcagtttaccatttcccgccgcgggggtaaggcctcagatgtggccctcccccgtggcagcagcccctcagtgctggctgtgtctgtcccagcccccaccaatgtgctctccctgtctgtgtgctccatgccgyttmactcatgccagggggaaaagccagcagnccctttcccacgtggggagctggagtctcccaagcccctggtgacccctg

SEQ ID NO: 78 - DNA, 422 bp, Homo sapiens
  misc_feature (362): n equals a,t,g, or c
  misc_feature (399): n equals a,t,g, or c
  misc_feature (405): n equals a,t,g, or c
  misc_feature (418): n equals a,t,g, or c
gaacctatgcacatcctcccacgcacttcatctctagagtaatcacagcacctaatacaatgcaaatgctgtgtcaacagtcgtactctattgtttagggaataatggcaagaaaaagtgtggacctgttcagtatagatgcaatttttttcctaaatattttcaatgggtggttggttgaatccatgaatgcagaacccacggatatgaagggccgagtctaagagataaaatagcagctagagaatcctatgttccaccgtctcattcatgaaaggggatgtggggttaattttagaaatataaaaatattccagtagtgttggtctattgacattcagacagtgcccgaagtcaccctntgacccttccgctcttgtgttggtgaactagagggangaaggncaacaggcttttncata

SEQ ID NO: 79 - DNA, 426 bp, Homo sapiens
  misc_feature (369): n equals a,t,g, or c
  misc_feature (394): n equals a,t,g, or c
  misc_feature (422): n equals a,t,g, or c
  misc_feature (425): n equals a,t,g, or c
gcgagagccggcgccgagcgaagccgagcggaagcccacccgcagccgacacgcgagccgctgccgcggcgggaggtgctgagagtgcggcccgccttctgcacgccgggcgagtacctcatccaccaaggcgatgccctgcaggccctctactttgtctgctctggctccatggaggtgctcaagggtggcaccgtgctcgccatcctagggaagggcgacctgatcggctgtgagctgccccggcgggagcaggtggtaaaggccaatgccgacgtgaaggggctgacgtactgcgtcctgcagtgtctgcagctggctggcctgcacgacagccttgcgctgtaccccgagtttgccccgcgcttnatcgtggcctccgaggggagctcanctacaacctgggtgctggggaggctctntana

SEQ ID NO: 80 - DNA, 173 bp, Homo sapiens
ggtttggggaggatggcgggtagggacgcccgacagccccctctgtgccgtgcaaccgccagccaggtgtgcgcgtgggtgagtgtgtccggggcgcgcgccccgccaccgcccccgacgtaccggggattcccccttggaaatggggcggcgcccggggctcccgagagaag

SEQ ID NO: 81 - DNA, 459 bp, Homo sapiens
  misc_feature (182): n equals a,t,g, or c
  misc_feature (287): n equals a,t,g, or c
  misc_feature (416): n equals a,t,g, or c
  misc_feature (434): n equals a,t,g, or c
gctgtttcgttcatcctatggctgtctttgagatgtggggactgccctactcacactgcaaacactgttgggggatggcggcaggtgtaacttgctgccaccttaatgccatgggaggggacwggcacgtggttaagagaggtcttttctgctctggttccaccctgaggagtccagtctangaggagttggtgctggtcctaatgcctcctggcctggttccatgtggtagcaggtgccactgatgcttgtgacacatacagtgcccctgcaggtgccttatgagngctcatccatctccttgccatccttgtctccctggctctctggaaaagaaagaagcccaccctctctgcaggggagagcaaacagcaagttggctcatcccgtcattgcttatgtcacgtccaagttgnggatgaatgttcagagantgacacagccttggtcagaactgac

SEQ ID NO: 82 - DNA, 612 bp, Homo sapiens
  misc_feature (357): n equals a,t,g, or c
  misc_feature (563): n equals a,t,g, or c
  misc_feature (571): n equals a,t,g, or c
  misc_feature (582): n equals a,t,g, or c
ggtgcttccatattattcagaactcttctaagtcattaataaatatactgaacacctgtgctagcactgatccctgaggcacctcattattaacctaattgcacagcttcatgatatttcatttaaccttgattttactatcaaacttttttcaaaccaagacatttcaaattaataataaaactttaccttgtatcttgtgatcaccatggctttataattgaatttgcacatttaaaaaattctgaatgaaatacttgaatgttcattttttaaaaaaatttcaaacaatatttatacacttgtctcccaggtattttctgaaattcgacttgtttacagtcttcttttcattgnttttcttcatcagctatttttaatatgttagggtaaagaaacaataattccatagtcacagtattgtggttttggatacaattctttttgtgagtccaactcctcaatgctattttattgctagctggtcctcatcaaactggagcaggaaarggaaaggagatggaatgktggctgcattcctattcatcagcgaagctttcgcnaggtgaanaaatgaggttngaaccttctggggttaaacatacttatggg

SEQ ID NO: 83 - DNA, 245 bp, Homo sapiens
  misc_feature (132): n equals a,t,g, or c
  misc_feature (241): n equals a,t,g, or c
ggctgtattggccagtgtagcactgaagaaatatcttcactacattcccctcaatcccttatcactgtggataggtatttttcctggggtgaaaatgaaaagggaacgtttataacaatgctagttttcagncttcttttttttttcgaggtagagtcttgctctgttgcccaggcgtgcaatggcgcgatcttggctcattgcaacctccgctcccgggttcaagcaattctcctgtctnacct

SEQ ID NO: 84 - DNA, 414 bp, Homo sapiens
  misc_feature (293): n equals a,t,g, or c
  misc_feature (331): n equals a,t,g, or c
  misc_feature (340): n equals a,t,g, or c
  misc_feature (362): n equals a,t,g, or c
ggttacaagggcacagtggcaattatgatgctttacaaaaataccatatatgttttgtacttttaggaaaatgaaaactgcacatttgaaataaaaaaagaagatgcagctgggtgtggtggctcacgcctgtaatcccagcactttgggaggccaaggcaggtggatcacctgaggtcaggagttcaagaccagcctggccaacatagtgaaaccctgtctctactaaaatacaaaaaattagccgggcgtggtggcgcacgcctgtagtcccagctactcgggaggctgangcaggggaaatctcttgaactcgggaggcgaaggttgnagtgagccnagatcccgccactgcactccancctgaacgacacagtgagactcccgtctcaaaataaataaataaataaataa

SEQ ID NO: 85 - DNA, 317 bp, Homo sapiens
  misc_feature (305): n equals a,t,g, or c
  misc_feature (312): n equals a,t,g, or c
  misc_feature (315): n equals a,t,g, or c
ggaactagtctcgagttttttttttttttttttaaaccctgtttcttgaacccaaactttctgctcctcaatcttcctattgggactgacttagctcagctttaactatccagacggtttctttgctgccttccagaattaccctcttcaaggtgataggagaccctcttcaagtcccagactgaacatggcacttctaaacttaaacatgcaatctggttcccctttgtgcaaacccacagggcccttctcacagtacccaattcactcagccagactttttccagaagcagggtgccttcaancaaactnttnct

SEQ ID NO: 86 - DNA, 351 bp, Homo sapiens
ggaaggagccagagaggatctggcagagaggacgaaactgaagtccagagaagcacagtgatctgctcaaggtgacagggtcagggcctgcaccaaaactgaggtcagttgatttcactggactgaggagagaagatacagaaatgaaggcccctggggcagaggrgaacctgaggtgatggaaagtcggcaagaggcgagatgcaacttacaaattaccatttttctgagggtggggcctttcctttttttgcctgtgaggatatagtagactttcaaaaaatggctctggtctgactgaaggtggggtcaggccatcaaaggaggaagaaagggccaaggagaagtgat

SEQ ID NO: 87 - DNA, 640 bp, Homo sapiens
  misc_feature (503): n equals a,t,g, or c
  misc_feature (551): n equals a,t,g, or c
  misc_feature (597): n equals a,t,g, or c
  misc_feature (611): n equals a,t,g, or c
  misc_feature (615): n equals a,t,g, or c
  misc_feature (617): n equals a,t,g, or c
ggagtaggataaagtctaatctcctaaaccctttaattctgactctaaggaccctccacaatctgctcctaaatgactatttttcaccttatctttcactacttttcacctctgttcttcgatttcttttaggcctgcctacttactctgttctgggcttttgcatgagtcattctgcatgtttaggacaatttcacactatctgtaaatgacagcccagccccctgatcccagacacacactcaaacccagctacagtgatgtgtctcatctctgaattattgtgggactttgtgctataacactatcatttgtaccactcatttcacacatcatattctccactttggttttaattagcattttatgtgtctatatgtctgacctccttaacttcccataggtgaagatcatccatgtctctttccatttatgttttatatctgaaagaatgcaccagatggtgctttatactttgcatttcttgcacctctctaatttanggccctccctaccccttgataggagtgtgggaatagtctcttgacttngggctattctccttacagtttcttggcaagggttttcctaaaaacncccaattttggatncatngncaacatccctcttttttaaaaaa

SEQ ID NO: 88 - DNA, 138 bp, Homo sapiens
gtagaaactctccgggagggaaacagcattttgtgtcttaacaagccctccaggacactctgatgcaccccccacccccggcaagactgagaaacactgacccagaggttattcctctaggtcttaagtagatatttg

SEQ ID NO: 89 - DNA, 534 bp, Homo sapiens
  misc_feature (521): n equals a,t,g, or c
ggggatggatgccaaggccacttacatccatcaccacgtcagggctttgcaccgaggttgtgtaactgttggcctagccagacctcaccatggggaaaccaagcaggaggaagactccacttctctgtctttctcagtgggtactgagtaacacagtgggccacgtgttggccaggtgctgagaatccacaggtgaacctgaccctgtcccagactcctgactcctcaaggagctaaacagccttcaaattaaaaagcctcaaatcagcagataacccaacagcgaccattgatamtcaggcagcagtcagcccgtcggsgagtgytggaaacgcaggatttacactgatgacgtacacagtgtgtgccacttgggcctgggaggattgacagcacggtcacagacggtcatccttacaggattcacaccaggtaccccctcgattctttgctgtgccaccaccctccactcactgagtctggcccctctttggggatccttggcacagccccagaagatngaagctgattctt

SEQ ID NO: 90 - DNA, 359 bp, Homo sapiens
  misc_feature (333): n equals a,t,g, or c
  misc_feature (336): n equals a,t,g, or c
gtctgagtgtccccttgcatggtcaagtgtgacatggggaagggcctgccagtttagtggctgcagacttgggactctctatcccattaggacacacttgagcccactcatgtctctggggcttttctagccagatgatgcctgtggccccagagaggtcccctgaggttgggactgctggttggagcctctcctgtgacttttcagcccaaccagcagggcccgtttctaacgagagaggcctyctcccccttccacccaccccatggccttcagcttccctgggaaggtccatgcgcgttcctggggaaatcgatacacattcggctttgntanaataacgcgaaacattaaaaccc

SEQ ID NO: 91 - DNA, 442 bp, Homo sapiens
  misc_feature (302): n equals a,t,g, or c
  misc_feature (311): n equals a,t,g, or c
  misc_feature (315): n equals a,t,g, or c
  misc_feature (330): n equals a,t,g, or c
ggtactttctctcagtccatatcctggcctacccgacagggactctgattcggaagatctagggatgggctcaggcaactatattgtagtccagcagccagcagtggcttatacaggtggaccaaactttgagaagcttccagtgacagaatgagaccctgtctcaaaaaaacaaagaaagaaaagaaaaggtacttaatatcttcaaatattcaagatctgaatgagaaaaatgtaattttaggtcaggtgtatataaaaagtatccagcaatttcatagctacttatcttcatggactgnttccttggntggntatctctggcactgntcatatcacaccgagggttggtacctgctggctttcacatcttcctggtctttcactcattgactaacttttcacttatttaatcactggtttcaaacatctctatgtgcca

SEQ ID NO: 92 - DNA, 543 bp, Homo sapiens
  misc_feature (506): n equals a,t,g, or c
  misc_feature (508): n equals a,t,g, or c
  misc_feature (540): n equals a,t,g, or c
  misc_feature (541): n equals a,t,g, or c
  misc_feature (543): n equals a,t,g, or c
ggcaaattggggctgggctctgcttgatggttcttctgctggtcttattcctgcagctgcagtcagttggctgttcagctgggactggacagtctggtaggcttcatttatatcttacaggtggcaggcaactgtctgggaagccttgattctcctccacctggcctctccagctggctagataccattcatatcgtggtgtgagaattcctgatgtgcaagcacttttcaggcctctaattacaccatatttgctactggcccattggccaaagcaagttacatggccagctcagttttcagagatgggcaaatagactgtaatttttgtwtttttttagatagtatctyactttgccacccagggtagaatatagtggtgtgatcttggcacactgcagcgtcaacctcctaaattcaagcgattctcctccgtaagacccccaagtagctgggcatacagatgtgggccaccacgcctggctatgttggttggttttttgtananaatggagtttccccattgttgcccaagctggnntn

SEQ ID NO: 93 - DNA, 535 bp, Homo sapiens
  misc_feature (455): n equals a,t,g, or c
  misc_feature (465): n equals a,t,g, or c
  misc_feature (514): n equals a,t,g, or c
  misc_feature (517): n equals a,t,g, or c
  misc_feature (525): n equals a,t,g, or c
gtacaggcataagccaccgcgctgggcctgaggaaaatttttaaaaaataatcgagactgctgttatggtgacaccaccacgagaagctacaagcaaaatactgataacctcatatgtgaaaatttttcatattgtttaaaatattatgaacaaaagaaaagacaaataacaaactgggaaaaatatttacaactcatcacaaatggctaatccttttaatgttaatatttaaaaaaaaatacaaatcaggtcaggcacagtggctcatgcctgtaatcccagtactttgggaggctgaggtgagaggatcacctgaagtcaggagttcaaaaccagcctggccaacacggagaaacctgtctccattaaaaatacaaaaagtagccggacgtggtgtgggcacctgtaatcccaactactcgggaggctgaggcaggagaatcgcttgaacccnggaggtggangttgcagtgagctgagattgcaccactgcactccacctgggcgacagancangaatctgncttaaaaaaa

SEQ ID NO: 94 - DNA, 707 bp, Homo sapiens
  misc_feature (10): n equals a,t,g, or c
  misc_feature (685): n equals a,t,g, or c
  misc_feature (687): n equals a,t,g, or c
  misc_feature (705): n equals a,t,g, or c
ttgcccctcnctaaagggaacaaaagctggagctccaccgcggtggcggccgctctagaactagtggatcccccgggctgcaggaattcggcacgagcagaatcgaaccaggaagcagctctccaagactagtctcttccaaggaagatcttgcaggtccctctgctggctccggttctgcgaggttcagccggaggcccacctgtcctgacacatctgttgctggcagcctccccacacctccagtccccagacacaggaagagccacagcctaggcaacaacaggggacgtctctatgccaccctggggcccaactggcgggttccagttaggaattctcccagaacccggagctgtgtctacagccccaccggcccgtgcatctgttctctggggaactccgcagctgtgcccaccatggaggggcctctgagaagaaaaaccctgctcaaggaagggcggaagcctgcgctgtcctcgtggaccaggtactgggtcatactctcaggatccaccctyctgtactacggagccaagtmcttgcggggcacagacagaaaacactataaatccacacctggcaaaaagggttccatcgtgggctggatggtgcaaactgcccgatgacccccgagcacccagatatytttccaaccttgaacaaccccttgacaaaaagggcnantggttttacaaagttttnaa

SEQ ID NO: 95 - DNA, 362 bp, Homo sapiens
  misc_feature (312): n equals a,t,g, or c
  misc_feature (347): n equals a,t,g, or c
gttcccatgccttaggaaagttactaaaggtcactgagccttagttcctcatctgtaagatgggaagaagattattaggaaaattaagtggaagcaataataatatcagctgwtgcctctggggctgtgcttgcctgckagccacaccaggctgcagatgacaggaaacacagtgagagctggagttgctgctgactgggtgcccctccattccagcaattccctttctgtttgatgtccgtgaacatcacccacattgccatccaggccttgagagaggagtgtctctccagagagtgtaatcggcagcanaaggtcatccccgtggtgaacagcttctatgccgncacattcctccacct

SEQ ID NO: 96 - DNA, 502 bp, Homo sapiens
  misc_feature (238): n equals a,t,g, or c
  misc_feature (434): n equals a,t,g, or c
  misc_feature (478): n equals a,t,g, or c
  misc_feature (491): n equals a,t,g, or c
  misc_feature (497): n equals a,t,g, or c
ggaaggtgtcaggccatgaaaggaaatcattccatattctccaataaaactgtgagagccagaagttaggcagtcttcaagtaagtcggatctgcactgcaaaaggagcttccgacttcttggcctagaagaactctgccctatatgtgtagtgcttggaaacatctcttgcagctatcacattccacacccatcccctaatttcctatgctctacttagtgagccactgtgtcctangagatgaaaagacctagtccttgcctttgggaaaatagcatcaggacatgtgctctgactagattccctttcaatactgtattgattgatgttgaagtcactggacagaaattgaggtcgaggaaatattcaatattcatttagttgtaaacgactattacacaaagtgctagattcatgaggctatataatattntctttttttttttttttcaagacgcagctcactctgtcgcctangctggagtgccanggtgcnaactc

SEQ ID NO: 97 - DNA, 431 bp, Homo sapiens
gcaaggttaaaaaaaaaaaaaaaaaaaaaaaaaatctaagtcccaagcatgtatggtggaattgaccagtgtttaataaatatcttctgaaatactagacagaattggttgcagactatgaaataatttccatgtctttatttcaacaactgcaatttttattgtctttttaggatttccaattccatgtgtccctctcttcctgccttaactgtgtctcatttccttataatgtgctctctgattactgagcattttctgcgtattttcatatgcaaaaactaattacccatctaataattatttagtggtttcagatacagacgtactataatagagtcatagatacatggaaacatttaaaatacattcaaaaccaagatgagactagccatgatttgagtaacaagcatctttaaaataatgttaaa

SEQ ID NO: 98 - DNA, 510 bp, Homo sapiens
  misc_feature (422): n equals a,t,g, or c
  misc_feature (462): n equals a,t,g, or c
  misc_feature (472): n equals a,t,g, or c
  misc_feature (474): n equals a,t,g, or c
  misc_feature (509): n equals a,t,g, or c
gctgaaaaccaaactccagccgctgccagtcgggacttggtcgcccggcgctgccagaatgctccactgccagccggcccccctgcctcggtttcccttctgtttagtggcgacacaggcacccagctttggcacacagggaaggctgcccgatgacgtgcctcgactgtgttacatttactgaaggagagcggcctcctgggcacgccactcaggcacggtgaggctctgtggcaccaccagccgcatggcagggcagagagtggcgccgtcctgcatgccccccacagcagaccagagtcccgtcctcacgctgcacagtgggtgatgtgagtttcaaaactacgcctccagaccgagaaaccctyccagctgtcagcaagccgtggcgccgagctgccgggcacctgctggctgctctncagtctcaagggagctgggacagcgggcatgggggaggancttggcctcnangggggggccccgggtacccaatcccggcctatagng

SEQ ID NO: 99 - DNA, 309 bp, Homo sapiens
  misc_feature (300): n equals a,t,g, or c
  misc_feature (304): n equals a,t,g, or c
  misc_feature (309): n equals a,t,g, or c
gcaagctctacgactcgctgctcgccctggacggtcacatccaatcagcgcgggccctgatggtggtggccgtgctcctgggcttcgtggccatggtcctcagcgtagttggcatgaagtgtacgcgggtgggagacagcaaccccattgccaagggccgtgttgccatcgccgggggagccctcttcatcctggcaggcctctgcactttgactgctgtctcgtggtatgccaccctggtgacccatgagttcttcaacccaagcacacctgtcaatgccaggtatgaatttggcccancccntgttn

SEQ ID NO: 100 - DNA, 487 bp, Homo sapiens
  misc_feature (400): n equals a,t,g, or c
  misc_feature (452): n equals a,t,g, or c
  misc_feature (461): n equals a,t,g, or c
gtggctctgtccctgaggatgctgtttatggggctgtaaatcacagtcagccctggactttggtctagtccctggtagaaggaggcaggagggtggggtggccagaggccagggcttctgcattatcagtccagagctggggctctccaggcagtgggaaagacaggagcaaacaagaggccagcagctgaggagctcactgattgtgagttttcagagcttctgaggctctctctgtagaatgagatctcagattttccctccagccccctccccactctagccatggattttttgcattttagtccatttgcatgcctyttaacttcaaaaaccccgactcccttccatcccaggcccttytgaggaacttgcctaacttctctccccaaggccaggngaaaatgtgaattgagggttgcttctgaaccctttgcagggccacactgganggttggttnggaagtacagattcttcaggttctta

SEQ ID NO: 101 - DNA, 414 bp, Homo sapiens
  misc_feature (399): n equals a,t,g, or c
  misc_feature (407): n equals a,t,g, or c
ggccagctgctggctggggcatcgctgccttccctgcccgagagccaggggccttccctcctgtgcagcgactcctgaagaactgtatctcggatgcctgtgcccacatggtcctcctcccgtgtggggctacacgaggctgtgttgccgggcactctgggtggatggtgagacaccttgtgtgtctctgaccagggctggggcccctcacagggcatgcagaggacgcaggtttcactggagagggaagtcactaggaggtccccgtcttcctccgggaggtcctggagatgcagtctccatcatccargcacagtctgacctaatctgctctcagcctggacaaatgtgggcatyagtgagactgccatccatttaccaccccacaaagggtgctgnagtttgangactgtt

SEQ ID NO: 102 - DNA, 331 bp, Homo sapiens
  misc_feature (7): n equals a,t,g, or c
  misc_feature (327): n equals a,t,g, or c
  misc_feature (331): n equals a,t,g, or c
gaccggncggaattccgggtcgacccacgcgtcsggaactccaaaaggtaaccccggggtagggttgagggactggttctttgaggttctgcyctttttccatgattcagaccaactttctcttggtcatttctggagtataactgactcaattcttgtaaaaatgtgttccacccaaaccactgtatgktcttttccctactttattttctcctaccttccttctcctaattgtgttacaagaggcagccatagcaagaatggaaaatccagatcagtaaaagattcaacaaaaaaaaaaaaaaaaaaaaaaaaaaaaaaaaaaanaaan

SEQ ID NO: 103 - DNA, 454 bp, Homo sapiens
  misc_feature (251): n equals a,t,g, or c
  misc_feature (414): n equals a,t,g, or c
  misc_feature (443): n equals a,t,g, or c
  misc_feature (447): n equals a,t,g, or c
gtcagtgaccgttgccgaaattacccggtgcgacccacggcgtccggtgcctcagctttccctcagtagctgggactacaggcgcgtgccaccatacccggctaatttttgtatttttagtagagatggggtttcaccatattggccaggctggtcttgaattcctgaccttgtgatccgctcgcctcgacctcccaaagtgctgggattataggtgtgagccaccgcgcccaggctattaatttttcctnttaaaaaattatgctttcgttttcacgtgtattaaagaaaatagtctgctttgacatacatctggaatttattgtcacacctcgtttagcattctttgtgtatgctggatggcaggggaggggtgatacaatattttttccttgtaaattcttgatggttgcntttttattcataggcccctcttgggagtnccgntggcctt

SEQ ID NO: 104 - DNA, 400 bp, Homo sapiens
  misc_feature (274): n equals a,t,g, or c
  misc_feature (278): n equals a,t,g, or c
  misc_feature (390): n equals a,t,g, or c
  misc_feature (398): n equals a,t,g, or c
gccagttttaaccataaacatctaggaggctagggaataccaaactttctagaaacacagcccagcaagtcccagcttcattttgctagccctcactcaaaatggagttgctctggttcacacgtctctgacagcaggattaaaagataatatgggccaggtgtggtggcttatgcctgtaatcccaacactttggaggctgaggtgggcagatcacctgaggccaggagttggagaccaggctggccaacatggtgaaacctcgtctctactnaaantacaaaaattatccaggcatggtggcgcccgcctataaatgccagctactcaggaggttgaagcatgagaattgcttggatccaggaggcagaggttgcagtgagccaaagntgtgcggntg

SEQ ID NO: 105 - DNA, 72 bp, Homo sapiens
ttgcaaaagctatttaggtgacactatagtgagtcgtattataagctagcttgggatcggtcatagctgttt

SEQ ID NO: 106 - DNA, 335 bp, Homo sapiens
  misc_feature (332): n equals a,t,g, or c
atttaggtgacactatagaaggtacgcctgcaggtaccggtccggaattcccgggtcgacccacgcgtccgatcacaataaaaaatgattgtgcccagagtagcagtaccacttgaaactttgggtttaggttgtgatctaccaaaaaataaattaaactcattaatatttctatttaggaaaattctgacaagcaattttataacaagatcacattattaattataatgcttcgaaaatacttagtgacaaaaactaacagatcaggttaactacatgagacttttcaggggaaaaaagccatacaaaagcaaaaaaaaaaaaaaaggggnccc

SEQ ID NO: 107 - DNA, 538 bp, Homo sapiens
  misc_feature (368): n equals a,t,g, or c
  misc_feature (372): n equals a,t,g, or c
  misc_feature (413): n equals a,t,g, or c
  misc_feature (437): n equals a,t,g, or c
  misc_feature (465): n equals a,t,g, or c
ccgcccacgcgtccgsccacggtgccgataagactgagggagagcatatgtgtgtattgtggcttattgttacaactatctcctagattcattgaagatagaagttacgtttgtttcatagtctcctcattggcttgtagcaatttttcaaaagaaggaaggaaacatttttaccttacaataaaagtctgaaaccacatattttatggtgatctataggaggactaactggaaccagtcacagggtactgtccctaacagaatgtgcatctttcatgcagtaattatattttactagtggaaactacattccaggaaacctttacataaaggttttacaatgttggaaaataaaagatatgcttttnaccnttaaggaggaaaggtgggacttaaattggggaatattatangaattatttcaaaatcagactgcnttttaaaaaactttcaactttattttangtaccgggggtacattgcaggttgtcaaacgggattttgcatgagctggggtttcggtacagtccctgacccg

SEQ ID NO: 108 - DNA, 303 bp, Homo sapiens
tagaatttgaactctctcaaagttataattttctggtacctgaatagccataaactaagccagaagtatcctccatttttcctctccttggaaactaccttaacaagccccaaccagctctgttacttacctccctccaggaggcaggtgattccagcagctgtccctccaggagctgtacagtgaatgtctatgaaacgtcacggcaggggcgctgacctttgcaaggcttcagcagttgtgcttttttgtgaagactgttttggtagacactttgcctgcatttctgtaggaaagggatgt

SEQ ID NO: 109 - DNA, 371 bp, Homo sapiens
  misc_feature (337): n equals a,t,g, or c
  misc_feature (361): n equals a,t,g, or c
aattcggcagagctatgataatgccactgcactccagcctggatgacagaaagagaccttgtctcaaatacgagagagagagagagagagagaaataacagttacaataaggctgtctggcagcactagtggattctgcagtgataagggaaagagtaacactattttctgataaatccttttatgttccatcacctttaagggtgaaatagggttttgttttgtcaataaaaatgtcgacatgtccccccactgccacggtggagaagggwccacgttctgaggcccagcaaagtcccagtyttgcagacatggggcaagcctctggggaactttngggttgccctgtgaaaatgtgcangtccctttgg

SEQ ID NO: 110 - DNA, 161 bp, Homo sapiens
  misc_feature (118): n equals a,t,g, or c
gggcacgtaggcccaaatggtatttaatctagaaatcattttkacattggaatatggatgcgtcagatactccatgaattcataatgctttcaaaaatataatgtgcccacactgtgnatggactgactggggcagagctgaaaatggttaacatctgtca

SEQ ID NO: 111 - DNA, 265 bp, Homo sapiens
ggcacgaggccacttgtgcgatcccggaccttgccgcggccgcctggctcctttccgcgccatgagccgcagttcacggtcacctcgctgccccccgcagcccgccagaagccctgacccagagtcccgccggcattcggtcgcagacccgccacctcccgggggaagacgtcaaagtctcccctcaggggcactcatcaggggtcctctccctggctctgaggccctcgggtctggaagaacaaggcgaatcggcttgtagtgg

SEQ ID NO: 112 - DNA, 350 bp, Homo sapiens
  misc_feature (173): n equals a,t,g, or c
  misc_feature (311): n equals a,t,g, or c
  misc_feature (325): n equals a,t,g, or c
  misc_feature (342): n equals a,t,g, or c
ggcacgaggcacgcacacgggccatgtgcagcttgtggacctggccagcacggagaagccacccgtggacattcctgcacacgagggtgtcctgagctgcattgcactcaacctgcaggraacaagaattgcaactgcatccgagaaaggcatttaatccaggaactgcgaangaggatctcaagcagccaatatttactgcatcaacttcaatcaggatgcgtccctcatctgcgtatccagcgaccacggcacagtgcatatttttgcagctgaagatccaaaaaggaataaacagtcccagtttggcntcagccagtttycnttccaaaatattcattnccaatggg

SEQ ID NO: 113 - DNA, 681 bp, Homo sapiens
  misc_feature (64): n equals a,t,g, or c
ttggtcagaaaagagcttgaagaaattgccaggactcacccagaccagttcgacctgtggtacncctggacaggcctcccattggtccctggtcggcagagggcgctaccctactgagcaattctgcgcattccactaacaccaggccacaccctgccggacaactccagctggctgtactgattcacacacctcccattggctggaagtacagctcaggcttcgttactgccgacatgatcaaggagcaccttcctcctccagcgaagtccacgctcatcctggtgtgtggcccgccaccactgatccagacggcggctcaccctaacctggagaagctgggttatacccaggacatgattttcacctactaaaacacctccatgtgctcagcaawtttgcatgtcccttttcatctgtttcagagtaagttcaatttcaccacggtaaactgggatgttttcaaaagtgccttgccatgtaccttcgcgcacacactggttctcctcttttgggtgtgggcctaacaaaaagggctcaaggggctggagactggctgctggggcctccttgcttggaggctggmaagagctccatttcagtatctttctccgtggttttgtgaaataaactcaagtacaaagcaaaaaaaaaaaaaaaaaaaaaaaaaaaaaaaaaaaa

SEQ ID NO: 114 - DNA, 375 bp, Homo sapiens
  misc_feature (289): n equals a,t,g, or c
  misc_feature (335): n equals a,t,g, or c
  misc_feature (359): n equals a,t,g, or c
tgagatgacttataaagccatattattatagatgtgtgttcaagtggtttatataaacatatatgtcaatagacctggaaaatgctaagtcataaaaactataccaggcaaaagtcgtttttttaaccttatttttgttttaatagaaatgcacatcttttttccttctcctcaaatatcatattttacctccaaccactacctgtgttttaaaatataatgtttggccattgggtaaatttcttcttttaaaaagcatcggccggggcacatgggctccacgcctgtnaatcccagcacttggggatgctgaggcagtgggatcaccggaggtncaggagtttagaggccagccgggnccaacgtggggcaaaa

SEQ ID NO: 115 - DNA, 412 bp, Homo sapiens
  misc_feature (332): n equals a,t,g, or c
  misc_feature (373): n equals a,t,g, or c
  misc_feature (379): n equals a,t,g, or c
  misc_feature (388): n equals a,t,g, or c
ggcacgagggaaggggcccagacttgggggtaacggcgtcactgatgtgggtccctggccccactgtggggtgtccagggttgtgcctattggaccgcccgcctcaccatcccacgctactgagcctccttcctcagccattgtccagcttcgtgtcaagtcctggcgtggggctcaccgcctgccccttgaccgtggagttcggacgcgtctcacaaaagtttcctaacactaactggaggtttaggggcactgtkgaagcaaaagccacgcctcagaatcccaggcggagattccgacctcgttcccgggaaggaaagcccattagttgnagcaactgcggggagatttaaagagagggattaaggagtgnattacntgacaaagngccacattcgcaggcggttggggc

SEQ ID NO: 116 - DNA, 430 bp, Homo sapiens
gacacgagaatacatcaaaaattaccatttcatgtctatacaacatacagaattattaattagatattttacaatcttttacagtcttcaaaatccagtgtgtcttttacatttatagcacatcttcatttggactagtcttattccagggctcaacagccacatgtggctaacaactaccatatcaggtagtgcagctccagagaatgtaggaaatatttaataatatagtttaagaaaagtttcttaagaggaaaatctaaatcttgttaactctaaaagcttatgccgattattagtgttgaattatgctaggttataaagaccaccttcytgkgtttagacttttacgccmatttagagaatcmgcmaagttgcatttaaggacyggggctcattaacgatgctggaggtaccactactctatcct

SEQ ID NO: 117 - DNA, 253 bp, Homo sapiens
  misc_feature (244): n equals a,t,g, or c
ggcacagtgcaatatttaagtgtaaatcttgttctacaagaaaggaaacttgcttacagtttaaaacaatgastgtttctacacatgatcttgtatactwstwcrcaasgaaaagggggttttgtaaacactgtagaatagtctcatattcatttttttatagaaatgttattccaatggtgcattttttgtttaataaataaagttttgatacaaaaaaaaaaaaaaaaaaccccgggggggncccggtccc

SEQ ID NO: 118 - DNA, 379 bp, Homo sapiens
  misc_feature (349): n equals a,t,g, or c
  misc_feature (365): n equals a,t,g, or c
ggcacgaggtttattttaaaaaaatgaaaagacatgcctttgaatttatgaaatataatatatacaacctttctgaagagccccatggttgattagtgtatcttaggttctgagaaacactgcagtaaaaatatctgttaagatttctttaaactagcatttcccaaaccacctgattagccatttgagtttctatcacaccactctgtctcataacatttgttagaatttctttggctctttcactgccaattgccttattgtgaggaggcatgaaaatkgggattcacccgtaactcackgccagcccaaggaaggcattgcggcgggagcgtatgggacataacanggcttgcaagaggagnggaagaccaccctc

SEQ ID NO: 119 - DNA, 445 bp, Homo sapiens
  misc_feature (419): n equals a,t,g, or c
  misc_feature (439): n equals a,t,g, or c
  misc_feature (440): n equals a,t,g, or c
ggcacagaaggtacctgacccctgacccccaaccctgaccccaaccagacggccaactctcctgagctgcatgactgctgtgaccagggtggttcacccctcaagaactccctttttgcttgggcctaccccagcctgatgggtaaactgaggcccagagaggctcatggctggtgcaggccagatggggacctgagacccctggtatcagagaaggccagggtggaggttattgcagggacagtgccacgaccctggaagtgcaacccctcctgcacatgtgacccgcctgcttctgccamctcctgggtcttgggcaccagggacatctgctcctgcgatctgaacaccctaaacaaacctgttctgcaagtkgggaaactkaarctcasaagttgcgaagggctgccctgggtcanaggggatggaagcagaactnnaaacc

SEQ ID NO: 120 - DNA, 98 bp, Homo sapiens
ggcacgagctaaattccagttactcctgtagccatttttaaagattattttttaaatttttcttcctcctcctccacctcctcctcctcctccttctt

SEQ ID NO: 121 - DNA, 345 bp, Homo sapiens
  misc_feature (307): n equals a,t,g, or c
  misc_feature (338): n equals a,t,g, or c
ggcacgaggagaaaggcatccttgacaaggaagaagccgaggccatcaagcgcatttatagcagcctgtaaaaatggcaaaagatccaggagtctttcaactgtttcagaaaacataatatagcttaaaacacttctaattctgtgattaaaattttttgacccaagggttattagaaagtgctgaatttacagtagttaaccttttacaagtggttaaaacatagctttcttcccgtaaaaactatctgaaagtaaagttgtatgtaagctgaaaaaaaaaaaaaaaaaaaaaaaaaaaaaaaaanaaaaaaaaaaaaaaaaaaaaaaaaaaaaaanggggggc

SEQ ID NO: 122 - DNA, 1174 bp, Homo sapiens
  misc_feature (679): n equals a,t,g, or c
cgaggcggcggaggcttagccccctcccctcccgcttcttcctcctcctcccggtctgagggcggcrgtctccgactcaagaccctggggctccgggtcttcttarmagccgccgcagcagccgcggcgacgtcactgtcctctcggcctggcacacagcgctccggccgccgaatgcccgtggacgcgcatctcttcccagagttcctgcttcctgggccagccaaagccgcagctgggaaggagaacaacatgctgcagcccgagacccacatcttcacagcccccgaggagggragctcccaaggggctctgctgcttggccaggccccagaacctttgtctctgccctgtamtccagtgaccttggagcagcaactggtttctccttctggggatccccacagggcccctgcctgcccagcatatgctcaactctratcctccagccctgtgccacccttraccctcttctactgcagccacaggtccccaaagtctctraccaggctttggtttctgcccactcagagtggcagcggaagygggaggccgctgaggytctgctgactctragaaactctgcccaggcccctcctgactccatctccctgcaccagccttgcaacccaccagctcctgctggaggataaaggattccagcctcccagcccctctntccgccccaggccagccagctccatctcgctgcctattggacatctgggatgcatctccctcttgagctaggaacccagaggaggaggcctcaatagagcactgcctatttggtatccagtttctgaatgtgcaaaatggttaacgtccaaaacgcttaacgtctttttttaaagccttcaggtgttttataagctttttattatatggggcaactccttggctgagggtggatattcttgtacctctgtcccttactcttttggatgctggggcctttttctgtctcataaagacaggattgtgcaatctaagttgatcagtctctcagtggggttctgtgtgagttcatatgccagagtttttattcgtcttgtgattgctgacatacctgtgcactcatgtgtatacccctgcatgtggaaacatgaagatgttttcactttgtgtctaggtttatgtacgtgaacaaataataaaccgttgttgttataaa

SEQ ID NO: 123 - DNA, 492 bp, Homo sapiens
  misc_feature (10): n equals a,t,g, or c
  misc_feature (11): n equals a,t,g, or c
  misc_feature (357): n equals a,t,g, or c
attgactcannaggagaaaaatatccttacatgtttttttttaatctcaaagtacctaaatgaaccaaactatgaggctctgattagtattcagattggaataatggaacaaaccattgctgttttagataagatgcacaaaaagaatgtggaaaactgcaagaaactactcaaaaaacttggaaagttcagcaatcaaaaagatatagcaaattatgccctaagctgcaatctacgagaagagttggtagctgtctcagagagaraagacatctgtaatgcatggggtctaaactgacttgtgaaaagattgtcaaagaacggtwtgaaacatgatgcacagcagaagttaacaantattcaaacacagctgaacagattycatactacgatgaagttgaagattagatgaaacattctgctctgtcaatgtaaacgtggcaggaaccaggccatcatcattaaatcwtcattggtatgatccttcttcta

SEQ ID NO: 124 - DNA, 224 bp, Homo sapiens
  misc_feature (10): n equals a,t,g, or c
  misc_feature (199): n equals a,t,g, or c
tcgagtccgnagcatcgccaagaggaaggtgtgccccacctcgttccctgctgcgtgctgttggaggccagtgacctgggtttgaatcccaatgacctcacaaaagttaacttcgtcttttgtgcctggatttccttgtctgtaaaatgagaattacaacaggytgttgtgagaattaaacaagatgtaaagacaaaanaaaaaaaaaaaaaaaaaaaaaaaaa

SEQ ID NO: 125 - DNA, 334 bp, Homo sapiens
  misc_feature (322): n equals a,t,g, or c
  misc_feature (323): n equals a,t,g, or c
gagggagatggcgtcggccaagaagaagcaggactcggacgccgagaagctgaaggtgggcggctcggacgcggaggacgacgacgaatacaaccggcccctggaccccaactcggacgacgagaagatcacgcggctgctcaagaagcacaaaccctcgaacttggcgctggtcagcccgtgcggcggcggcgcgggggacgccttgtgaggacccgcggggtgggggcgaatctatttttgcagaatccgggggcggccccgggtgggcgcgagtcgctttgtatcatcaataaattatttaacgggaaaaaaaaaaaannaaaaaaaaaaa

SEQ ID NO: 126 - DNA, 399 bp, Homo sapiens
  misc_feature (335): n equals a,t,g, or c
  misc_feature (378): n equals a,t,g, or c
  misc_feature (385): n equals a,t,g, or c
  misc_feature (387): n equals a,t,g, or c
tttttttaagaaacataacattgcagtgtacagcccactgtctcctcttctccttccttcctcagaggtaatgctgtcaagtaaatgtataccccagggtgcttgcagcctcataggtcagagactctcaaaacttcttcccccatttatttatttatttgtttgtttgtttgagacagagtctcgctctatcacccaggctggagtgcagtggtgcaatctcggctcactgcaacttccacctcctgggttcaagggattctcctgcttcagcctcccaagtagctgagattacaggtgtctgccaccaagcccggtgaatttttgtattttcngtagagacggagtttcaccatgttggccaggctggtttcaaangactgancntcaagtgatcca

SEQ ID NO: 127 - DNA, 169 bp, Homo sapiens
aagtaagtgcagagagggggcaataacgagtgcagaaggtggagagagaaagccggctagggaacaaacgatgcgctgcagccgcactccgtgcctgccgcgcctgtgcacgcgccccgcgcgcctccacctgcaagggccgcgcggactcccagaaacgctcctggaa

SEQ ID NO: 128 - DNA, 365 bp, Homo sapiens
  misc_feature (340): n equals a,t,g, or c
  misc_feature (342): n equals a,t,g, or c
  misc_feature (344): n equals a,t,g, or c
ggcacgagcacaaatatttagtacaattttggaggaatagtagaaacattttatagtttttccttgtcctgtatcttcatctagccttcttttcagctttcctatgtcctttgttctccttttataaggagagatgagttgtacaataacatccattttcataagttatttaggtaaattattttgaagtatacatgttggattccaaagcagctgtttttaattaaaatttaattaactaatttatgtcattatataycttgtgktaagacmaccttaacttycytttagtaagatttacccmactgkttaccctaattatagacaaataaaatgttcncncnttaaaaaaaaaaaaaaaaaaa

SEQ ID NO: 129 - DNA, 89 bp, Homo sapiens
ggcacgaggtctatcaactgttgtgtccacacctagaaaatcaagtgccctattaagaagctgtactttacaaaaaaaaaaaaaaaccc

SEQ ID NO: 130 - DNA, 240 bp, Homo sapiens
acgagatgatttggattctgcaagatgaagtatttgtgcaataaactgcaaaaagaaaatggacatctgcccattgcaatttgaggagatgattgaccgcctagaaaaaggcagtggtcagcagccagtcagtctgcaggaagccmaactactgctaaaagaagatgatgaactaattagagaagtttatgaatattggattwaaaagagraaaaactktccaaggccatctcctattcc

SEQ ID NO: 131 - DNA, 382 bp, Homo sapiens
  misc_feature (119): n equals a,t,g, or c
  misc_feature (352): n equals a,t,g, or c
  misc_feature (359): n equals a,t,g, or c
gaatacaggcatgcgccaccatgcctggctaattttttgtatttttagtagagacagggtttcactgtgttagccaggatggtctggatctcctgacctcgtgatccgcccacctcggnctcccaaagggctgggattacaggcgtgacaccacgcccagccaggtgacagtcttaaactatttgcttaaattacagaattatcttttcttgatttatctttgttttatttgaaggatctttagaagataatgaatagtataatattactttaccagtttaccataatttaaattgctaawgyctttgttcctcagcttcagaatttggaatataacggcccgctgtaaccntttaggnaatttgtggttaggaatttcatt

SEQ ID NO: 132 - DNA, 356 bp, Homo sapiens
  misc_feature (69): n equals a,t,g, or c
  misc_feature (193): n equals a,t,g, or c
  misc_feature (240): n equals a,t,g, or c
  misc_feature (324): n equals a,t,g, or c
tggaggtaccccatgtacattatgatggatcatgtacgacgaatttaggttaaactagaaggccacgtnaggcctaggtacaaccttcgtgcgctaactttacaaggcctaaccgcaattactacttaatacgccgactagttactgttttattgacccctcctacaccctgtactactggtcttttttgcantgcagcgttatatcttgtaggggataataatagctgtgggatggganagcaaattmttgagtactgctattattacatatatagggtcttacttcrctttaacmagacacttgtatcgctagcttgctatngttttcaatgaggacacgaccttgctgcgagg

SEQ ID NO: 133 - DNA, 217 bp, Homo sapiens
  misc_feature (89): n equals a,t,g, or c
  misc_feature (106): n equals a,t,g, or c
agagtgtgaggcgagaaggggcagcgagaagtgtccaggccgaaaagaagaccgagctgaagaggcaagagagtcaggtgaattgacanaccgctcaagggagatnaggcaggagtgcggattggtcgtgattgagatagtggagggacaggagtgcctcccgaaattcgcaacaggtagtttgcacctttgttttttaatggcagatctgaatacg

SEQ ID NO: 134 - DNA, 142 bp, Homo sapiens
ttaaatgagatgacagcaactaaaggcctgccaccatcaactcttggcaatttatttccctcctaaattagatagaaatgtcatggtttggggtttccattgtgtgttcaagaaagttaagmccgtaacgcctttttttaaa

SEQ ID NO: 135 - DNA, 171 bp, Homo sapiens
  misc_feature (156): n equals a,t,g, or c
tctacaaaataatatttttttcaatgttgactttatttctatagctgtgtgacttccagcaaattctttaacttcattggaaactcagttttttcagctataaaattaagagaataaataaactgtcccattgtatggatgcaagggattaaatgnagatgtacagcaact

SEQ ID NO: 136 - DNA, 393 bp, Homo sapiens
  misc_feature (376): n equals a,t,g, or c
  misc_feature (393): n equals a,t,g, or c
gagcaaaatcgagtacagccaatgtctaaggggacttgcaagctgggcagaagaccttactcaacacagcagatagacaacggagtgcttcagagcaggctgctgacgcagtgaggccaaaatataagaaaaaacagctggatgctggtgttgaagggacgtctggagacaatgaagagctctggcagcagagtgagtgtttcagaagacagttaaaggccttggtgacgaacaactgcggagaaggaaggtgttttcaaagtttgaacccaactgtgggggacggaagggagtgaattctgacaatttctgaractgaattcacagcaagacatcaatggctaattttaattacgtaataaagaaaatttctggntatacaaaaaaaaaaan

SEQ ID NO: 137 - DNA, 425 bp, Homo sapiens
  misc_feature (359): n equals a,t,g, or c
  misc_feature (379): n equals a,t,g, or c
  misc_feature (382): n equals a,t,g, or c
  misc_feature (404): n equals a,t,g, or c
ggcacagactgcctgggttccttcccagctgcataacttactgacagtatggccttagtagtcacgcagccttcccaagcctgtttcctcatccataaaatgggtatagcaatggtgcctttctcctaaggtttttgtgaaggttaaataaggaaggatatttgtaaagagcattggacagttagaacttaacatagttcttggaacatagaaggtactccatcaatgttaaatttcattattaacatagtgctttcttcaccacttgagagctatttcccctcggcattgattgtcmaccatttycagagcttttttcccctccatatagcatccttaagccagattttacttacccnggattttaattaaaggaaanggngtttggggccttaagggaatcnggaggttcccagggaagccaa

SEQ ID NO: 138 - DNA, 347 bp, Homo sapiens
  misc_feature (319): n equals a,t,g, or c
  misc_feature (340): n equals a,t,g, or c
ggcacagggccagcatcccagtgacatctttcccctctccccccaatcccctcccagccttgccccatttggtaaaacttcaaccttcctttctacataggctcaagcagagtcttcctcctggtgttccagaaggagttcaaggtcctgctccatatgggkacagctagattctgaggggcaatgttgagatcctcatctccagaaggtgctggtgccagaaatatggacaaaaggctggattkgacgggccaggcgcggtggcttcacgcctggtgattycccagcaattggggaagcccaaggccgggttgggatncatggaggtccaagaattttngagacca

SEQ ID NO: 139 - DNA, 437 bp, Homo sapiens
  misc_feature (353): n equals a,t,g, or c
  misc_feature (356): n equals a,t,g, or c
  misc_feature (365): n equals a,t,g, or c
  misc_feature (381): n equals a,t,g, or c
ggcacgagccgggctggttattgcccatcatggactaattatccggagatctgcatttcagaagcacagactggcttgaaaaggaaggtggaggacagtaccagaaaacaaaaggaaagcttaaaagcaaggaattaagaagtatctccagaattgtattccttatctcttaagcagattgaaaaagcggacttttacaggaaactcttcccccacccccatgtctcaaaaggaagaattatgtgtaccagattgcacttgagttttctgttgtgggtattgttacctcaagtgcgcctatttgatttaatacatcacagcatttatcctgaaatgctgcggttgagggagancgnctgaggggnaagctggctctcatcnaatgtttgtgttaagttggctctcatggaagggcatggagcagtgaaggagacagt

SEQ ID NO: 140 - DNA, 345 bp, Homo sapiens
  misc_feature (251): n equals a,t,g, or c
  misc_feature (308): n equals a,t,g, or c
  misc_feature (327): n equals a,t,g, or c
ggcacgagaaaccttatactcattagcagccagtctcatcccccaccccaactccctaccctgcccagcctaggaaaccattaatatgttttctttctctacagattttgcctattctggacatttaaaaataaatgaaatcataaaatgttatcttttgtggatggcttctttcacttacgtaatgtttggggaggttcatccatgtagcaaatatcagcacctcattcctttttattgctgaataatancccattgcatggataatgccacagttgttcatccattcatcagttgagggatatttngggtgtttcaactttgggnaataagaataagcgctgg

SEQ ID NO: 141 - DNA, 83 bp, Homo sapiens
taaaatttagatgttagattgaaaactgtagttttcaacataagcttggcaagaacacggggatagattaacggtagaatcct

SEQ ID NO: 142 - DNA, 859 bp, Homo sapiens
  misc_feature (850): n equals a,t,g, or c
  misc_feature (857): n equals a,t,g, or c
ggcacgagaggcgcctcttgcctgccggccctggccctcgccttcccaaagtgtactgcatcatcagctgcatcggctgcttcggcttgttctccaagatcctggatgaagtggagaagagacatcagatctccatggctgtcatctacccgttcakrcagggcctccgagaggcagccttccctgctcctgggaagactgtcactctcaagagcttcatccccgactcaggcactggttcatttcactgacacggcccctggactcccacctagaacatgtggattttagttctctattgcactgtctcagttttgaacagatacttcagatctttgcctctgccgtgctggagagaaaaatcatcttcctggcggaaggtctcagcaccttgtctcagtgcatccatgctgctgccgcactgctctaccccttcagctgggcgcacacctacatccctgttgtccctgagagccttctggccaccgtctgctgccccacccccttcatggttggagtacaaatgcgcttccagcaggaggtcatggacagccctatggaagaggtcctgctggtcaatctttgtgaaggaaccttcttaatgtcggttggtgatgaaaaagacatcctgccaccgaagcttcaggatgacatcttagactctcttggtcaggggatcaatgagttaaagactgcagaacaaatcaacgagcatgtttcaggcccctttgtgcagttctttgtcaagattgtgggccattatgcttcctatatcaagcgggaggcaaatgggcaaggccacttccaagaaagatccttctgtaaggctctgacctccaagaccaaccgncgttttntg

SEQ ID NO: 143 - DNA, 333 bp, Homo sapiens
ggcacgagctgaagcgcaaagacaagccaaagtgcggatgattgctgcagaagcggaaaaggctgcttctgagtccctgaggatggcagctgagattctktcaggcacccctgctgcygttcagcttcgatacctccacacccttcagtctctgtccacagagaagccttccactgtggttttacctttgccatttgacctgctgaattgcctgtcttctcccagcaacagaactcagggaagcctccccttcccaagtccttccaaacctgttgagccactaaatcctaaaaagaaagactctcccatgttataggaaggatgggcataatg

SEQ ID NO: 144 - DNA, 353 bp, Homo sapiens
  misc_feature (106): n equals a,t,g, or c
  misc_feature (308): n equals a,t,g, or c
  misc_feature (309): n equals a,t,g, or c
tttcaccatgttggccgggctggtctcgaactcctgacctcaaatgatctgcctgcctcggcctcccaaactgctgggattacaggtgtgagccaccgcacctggncctaattgtgtaatttaaaaacctgatttagtatgcatgttgtttgacagaataatagcagcaagctatttgtccctttcattcaaatttaccagactttataactraatgtgagtgagcatagttttgaagtattacatttctggtctttaaagagtaaataactcggccaggcagggtggctcacacctggtaaaccccnngacctttgggagggccaagtggggcgggttcatgaaggtccggg

SEQ ID NO: 145 - DNA, 452 bp, Homo sapiens
  misc_feature (418): n equals a,t,g, or c
  misc_feature (419): n equals a,t,g, or c
  misc_feature (434): n equals a,t,g, or c
tttccgccgctgtgcaaggccccccaaggcctgctgtggaactaggaaaccccaccctcccaaagcagtggtttcaaattttggggggtacagagacctttgtaagaatctgacaaaaggtataactttatgtcacatttccaggagctaacatacacctgaagtacatccacgccccaggaaagagcagccagcctmcagggcctcatcggacagggtgggattttccaagcaggtcatgggtcacgggcctctttgggggcctctgtctctatgtgtttattcagatctttagctgggctaagaaaatctctaaactttctgattttcaagatgttcattgcacagcagagggacatggattcaaaccgggccaatttacccctccagcaacccaggcttttcaagcccatgcacnnggtcctgcaggcatnaggtgtgagattcctggc

SEQ ID NO: 146 - DNA, 380 bp, Homo sapiens
  misc_feature (364): n equals a,t,g, or c
  misc_feature (376): n equals a,t,g, or c
  misc_feature (379): n equals a,t,g, or c
gagaatacggctatgtggcttgagtcacttgatgtacaactgcaacttctgcctttttttttttccctgtaaatcattaagaagaccaaatggcaccagagataagaaccccccacccccaccccccaagattactacctctcctcatagaatgaagcaaatgtagcattttgtaaccaatcaaatcactgtactgtatgcacttgtcttgtatggaaaatgttgtaattctgctaaaatttctgtctctgcttatataagcgaaacattaacttctcctctttgaaacactggmccccatttgtttgggagtaagtgttttccgggtgggcaagctttgtggctggaataagctctatacttnaatcaaatttcnggna

SEQ ID NO: 147 - DNA, 308 bp, Homo sapiens
  misc_feature (202): n equals a,t,g, or c
  misc_feature (246): n equals a,t,g, or c
  misc_feature (277): n equals a,t,g, or c
gtccaaacacttagggaggctaggcaggtggatggcttgarcaaaataaggattccaactccccacaattgcaaatatgaagaaactttatgttacctcagtttagaaagccagtttcttcacggagggttaatggtaggcttcagataatgacagcaaaacaaaactttacaatgtttctcaaactaacaaaatttgattntattggatttgattttatttctgagaagtcttataccctaaagnagattttcaatacatacatccgcaatttatncaattctgctgagaagatgcttcttgtcctt

SEQ ID NO: 148 - DNA, 275 bp, Homo sapiens
  misc_feature (246): n equals a,t,g, or c
  misc_feature (262): n equals a,t,g, or c
attgttttatttctacaaatctgttcattaatattgtgctttaaggctgaaatgaagtatattatgaatttttttaagaaaactcatcaaatttcagggtatcacaaaactttattatattattatactgcccactatttattatatgttatagatgtctgagaggtaaaccaaatattttatttttaatgttaaaaaaacatcaaatttaactttattagcatattttagcaactttgggataantacggacttttaactngatttggaaataa

SEQ ID NO: 149 - DNA, 467 bp, Homo sapiens
  misc_feature (448): n equals a,t,g, or c
gtcctttgaaatttcttcttttctatggatctaacattgatcaataacgaattcctaagcatctatattagttagcccagtgtttctcaaagtccaccgcatgtaaaaatcatctagggaatctttctaaaatgtggattctgatttagtaggtctggggtgaggtcttcccttttgcaattccagcaagttcccatgggatgctggtactggttaatggaagtcacttagagtagcaaggagcctgtttgcctagtatttacaatgagcacgtttkgggtatcatcaaaacaagaraatctaaaaatgtatggtgtgggtggaaggttgtgttacytgatatttccaaaagaycatkgaatcagaaaatctcmararrtawgttggrrttccaccacatttatccwagggcttaakgtkgttttatttgratatwtataggggggtncccccaatccttaggccat

SEQ ID NO: 150 - DNA, 560 bp, Homo sapiens
  misc_feature (499): n equals a,t,g, or c
  misc_feature (502): n equals a,t,g, or c
  misc_feature (507): n equals a,t,g, or c
gttcaataggaatagaatgtgagcaccatgtctaatttaggttttctagtagccacatttagaagtgtaaaaaaaaattgttttttttgtgaaagcagttttaacaacatattttttttactatatccaaaatgttatcctttcaacatgtaataaatttcaaaatgattaatgagatactttattttttcatactaagtttttgaaatctggtgtgtaattatctctagagcacaactcaatttgcaccagttgagcaccctgtttgtctagcctttattctctaactcaagagattagtaaacttctgtaactggcaagatagtaagtattttaggcttkgctattgtawtgtggaagtggtcacagacaakgtgtggctgtgttccmataaaactttatttacmagaacaggtggcaggccggatatggctggcaggctgtggtttacaagccctcactctaactaaatgtttcatctcgtgggtttaatgctcanaanttganttctattttgggctgctaccaaaatactatgttgataattcatccaaaatatc

SEQ ID NO: 151 - DNA, 374 bp, Homo sapiens
  misc_feature (343): n equals a,t,g, or c
  misc_feature (360): n equals a,t,g, or c
  misc_feature (373): n equals a,t,g, or c
gtgagaactagtggactgtaatgtgtcagtaacttttcccatctggtgacaggttaattcaggttatggatattttgggtcagccttctacttgtcccctttcctctgtaattcccatagagataggtcctttgactgaggaacatgtgttcttcatttctcctgaatctcctataaacctactggtgagagacctgctgtgcaacttaatagctactatattttgtactgtggatggaagtgtctgtgggagccttttggggaaaaggcacctggatttgggatactatatacttctggaaagaaaagaggtatggccagagatgggcatctcatacgtgcnggaaaatccccacaagntcaaacaagtcant

SEQ ID NO: 152 - DNA, 142 bp, Homo sapiens
catactaaatgattcyatttttttatttatgayttcatgactaccattaagaaaatataacctgttgggaaactgtttctgccttgatgatgttgtacagacaagagataaacagtgaggaatatgcttagatgtattggga

SEQ ID NO: 153 - DNA, 376 bp, Homo sapiens
  misc_feature (297): n equals a,t,g, or c
  misc_feature (308): n equals a,t,g, or c
  misc_feature (349): n equals a,t,g, or c
gttaaaaatccttctctgactttctgggctcaagatttctgttaggagtaaatctagacgttggaattttacttgcagaattctgatttgccttttggttccttggtcctctcctccctgtatgactcaaatgtttacagtgagtcgcctgtttttttgcaggcacatgagtgaattggaagtagatctagcaagggccatgaaagagacatcaagaatagttttgctttttatttttttgagagggagcctcgctatgtcgcccagactagagtgcaaggcatgatctcagctcangcagcctccanctccggggttcaagcgatctcctgctcagctcccgagtagngggatacaggggccgccacgtgctcag

SEQ ID NO: 154 - DNA, 324 bp, Homo sapiens
  misc_feature (291): n equals a,t,g, or c
  misc_feature (303): n equals a,t,g, or c
  misc_feature (322): n equals a,t,g, or c
gcgaccactgtgtctcaaaaaaaaaaaaaaaaaaaatgagaatcttagtgttttggagagtggccattgacgggaagattcatttttgktttaaacatttttcctggtaratgaagatgggattttgccttgkttttawtatctgagttttttaccttgktttgcaatggaattgttaagcatgtgcarcaagttgatgacaacccactcattgggttataaacatgttttaatggagggaacattgtaagtataagaaccagtttatcatcccatgaatggcggaaagtncagggtgggaanttccaagttgaaaagcatnaa

SEQ ID NO: 155 - DNA, 364 bp, Homo sapiens
aagacctctttatttcacagaacatgcaaggaggcactaaactccatggtcagctgggccatggagacaaagcctcctatcgacagccaaagcatgtggaaaagttgcaaggcaaagctatccatcaggtgtcatgtggtgatgatttcactgtctgtgtgactggtaagccatcagcagaaagtgtcttaagtgcatttaatgtgggggtattttgcttaatgctgtgcaatcttagttgggattttaaaacaaaagacagtatacaaagaaccagargaccttgagcaaatatactcattaataataacataccaagtttgctatagtattaggggttggttgagcaaggagaaagacaagt

SEQ ID NO: 156 - DNA, 395 bp, Homo sapiens
  misc_feature (210): n equals a,t,g, or c
  misc_feature (294): n equals a,t,g, or c
  misc_feature (360): n equals a,t,g, or c
cggacgcgtgggcggacgcgtgggtaaatatatatttatatattatatacatcatgatgtatataatatataaatatatacaatatataatataaatataattttatatataatatatataatacataaatataattttatatataatatacatcatgatgtatataatatataaatatatatttatatattatatacatcawgatgtanataatatataaatatatacaatatataatataaatataattttatatataatatatattttaaatatattatatagtttttatntatataatatatatagttagctttttttaaagatcctttgggaaattaagttcaaccttcaaaggnaaaattattttcaagtccttttgttaaaataaagt

SEQ ID NO: 157 - DNA, 499 bp, Homo sapiens
  misc_feature (480): n equals a,t,g, or c
  misc_feature (490): n equals a,t,g, or c
ctttaatgaaggtgctaatggtttctaacattgctattaatagcataaatttgtatatgttaagtactgaagcattttaaaatctattatcttatgtgactcttataataatcctatgaagcagggcaaataataattgcatttcacagctatttacagagaacataaatgatttccccaagtctgcagttagcaagcaactaggaccagatccagagtttctcaataaccggtccattaattcccagatgttaaccaacagggcaatgctggcccataacaaatgaaaaaacaaggatagaataaagaagtatcaagacaaataacttcaattcttttattgaagagactgcaactttactgcattttgggatttaaaatactctttgttagactccttactgccttaacggactacgtttgawgttggaagcaccatcatcccgaacacagattaatgttatgaatattacaggaacntttggaaatnttaccactt

SEQ ID NO: 158 - DNA, 533 bp, Homo sapiens
  misc_feature (400): n equals a,t,g, or c
  misc_feature (411): n equals a,t,g, or c
  misc_feature (466): n equals a,t,g, or c
atttcctccatgtgtgaatttagatgtatgagtttaggggggtgtgtgtgttttatataaacaatatggcaaggaatgctggctaaaatacaaagatctacagatgactctctcaggatgggcccttgggtgttgtggtgtggtgactacctcaaaacaaagggaaatgttttgctatgaatttcctgttcatggaaaactatatggttgaaaaaaaaaaatcttctttcctcttgagaactgtccgtgtgccaaagtaagaagaagctcctgaaargattactcaagcttcccctcccccacatcttctcctcatccccaaagcctaataattctgaaaaagatgaaatggaaagggcacttgtcactaaacttcttagcactttaaaatarccaramncattgcctganactatgcaagtttggactcacaccagccgtggaaaatactctgtcttttttttangaaattaaattgcattacccatccaccaaaaattattcctgaaaagtgggtttccttttcctgcctt

SEQ ID NO: 159 - DNA, 558 bp, Homo sapiens
  misc_feature (438): n equals a,t,g, or c
  misc_feature (464): n equals a,t,g, or c
  misc_feature (476): n equals a,t,g, or c
cacatttaaagcttttaaagctcccttttgagatgatttcttagggtactaaaatatcacctgccccagagtttacaaatcagaaattgaatgaggcaggcttaaagaggatcagaaaacaagataccaaataagagcagccattgtaaaactagagaaggttacgaaatggccctgcttttctataaggaakgtcgaagacaccaggccccttgccctgggtttgtctggtggaagtttaaggaaagttcataccctgggcccagtagagagctttgccttcataattgtctgcatatgatttgacaaacataakacctcagtgttcctakatcgtttatccccctcagcaatgtgctaaatatgaagtaaaaggttaccaaagggaggatagggaaaaaaaacctaattaccaatcctggtaattttaaacatganaagatttattaacaacggcttcttcntacacttgtganttctgacatgttgtgaaaataggaactgcttagccattgaaaggattttccatatattgttcgaaatggaaagaagaaccaa

SEQ ID NO: 160 - DNA, 538 bp, Homo sapiens
  misc_feature (510): n equals a,t,g, or c
  misc_feature (536): n equals a,t,g, or c
ccggaaataacaatccgagtaatgacccttcgcctgtaggaattcgcagccagaaatcgggaagccagggttccaggcatgaccccaccgcttgctgttaggatcaggtgtctcttcttctctggattgcactttccccagatgactatttctggcttccagagttattgcagctcagctggaaagacaaatgtaaccgcgttttgtgaattctggtagtctaaaggattgttgctattgcaaacgcaaagcattttgatagtcccgtgccgtcttgatcttttattaccctttacctttcctcaaaaagccatattctgagctgtcaccaaaattgtcttatttaagactcacaacgacctcgtgagacgacaaattgtacccattctaggaaggaaaaagaaactaagtctccgartggagaagcggcttgcttcatttagtaaatattaagcaccaaccgtgagacaggcagtgtacttaagtgctagaaatagaaccgtgatcaanattggcaaggtcctgtgctgtggganct

SEQ ID NO: 161 - DNA, 457 bp, Homo sapiens
  misc_feature (370): n equals a,t,g, or c
  misc_feature (385): n equals a,t,g, or c
  misc_feature (417): n equals a,t,g, or c
  misc_feature (434): n equals a,t,g, or c
gcatgggccggtccggaaattcccgggtcgacccacgcgtccgcaaattatacaagcaacatrattcattatctaaattttagaaaaatgagaaatcacccatcactgcactaactcaaatctctgtcatgagttttagttaataagtgttttctgacaatgacaaattttcatacatgaataagtatataaatatgttagcttaacttttacaaattgtacaagcaacataattcattatctaaattttagaaacatgagaaaaatcacccataactccactcactcaaatctctgtcatgagtttcagttaataaatgctttttgacaatgacaaattttcatttttagatattgcatggatgaacanggaaaactgttttanatatggtgaaaaatatatagttacatgagaanatatgtgagtgtgttangtgtgtttgcatgccatacatac

SEQ ID NO: 162 - DNA, 340 bp, Homo sapiens
  misc_feature (293): n equals a,t,g, or c
  misc_feature (321): n equals a,t,g, or c
atttttttcaatgacaattccataaacatcattaggcattaggtgttcagctctgcatataaggtcttcatcagcaagacggttacaagtataaaccatttcctatttcagaatattttaatattcaacatatttgtatacccacattctcttgttacaattattgccagaaagccaattgataagctttcaaaatgggcttatcacacccctccaaaaatagatttttgttttttctattaaacagaaattttcagaaatgagatttgagagatccgactgagraaaccttncagttaaaatgtggacatggacttaccnttatggctggtaatctgtt

SEQ ID NO: 163 - DNA, 464 bp, Homo sapiens
  misc_feature (426): n equals a,t,g, or c
  misc_feature (446): n equals a,t,g, or c
gatttttaaatgtattaagcagcccattttctttgtggaccttctagttttttcatcacatggtagatatcttttgtaccagtacccaccataaatagctgttatgaggataaagcamattggtatttgaaaagggtgatcgaattgtgtctggaacctatggttccataaatgttaactattttcattatcttgaataatagttatatcatcactattattattttactgttgtcagcatgcttttcaatctattgctgtctgtagccagatttcaggagtgttcaaaagcttccccctaagcagcttcccgttcatttagctcagtgcgtcccaagatgtctctgtactgtttttgcacttctggctgcaaacaaggctgaactgccctccttggataactggaaattgcttccttggtgtganattgttatcgtgaaaagtangaatgaacagcaacatct

SEQ ID NO: 164 - DNA, 477 bp, Homo sapiens
  misc_feature (234): n equals a,t,g, or c
  misc_feature (316): n equals a,t,g, or c
  misc_feature (464): n equals a,t,g, or c
cagaaagagagttctttggggggatggttaattcttgttttgggtgcttttcttcaccgctctaaggaactaccacagtcagaaggtgcattcttactgcgatctttttatttgctaccttgggcttaaggagcctgcctatatctactgagacagcccacctgaggatattgaccataaggactcatatctcattacaagaagcatcatggccgagccagactacatagaaanatgacaatcctgaactcattaagcctcagaaactgatcaatcctgtaaaaacctcccggaaccatcaagatcttcmcagagnamttcttatgaatcaaaaaagaaccgggttacccctccgtgaggcagatcccctggcaggtggccatcactgtggtggccagcagtgcttccagactcctgcagtcacgggttcccttctgaaatggatgtgtatttccaaattcggntggaagaggctgg

SEQ ID NO: 165 - DNA, 517 bp, Homo sapiens
cagttgagaaaggttgaaaaggcagagagagagagctgcttctgcaagtgtattgaacaatcaaaggcaaataattcgttacagctgggcattctgtacatgtagattagtgagagatgactgcagaggtcagcagacctcgtgccataaagacaacatggaagcagggagtcaagttctcatacctttgggcattcattctgaaattgctaaagaagcaaataaatgtctgtctgggctttcccgccatacatgactgagaatatccagacatttctctatattaaagaaaaaggagagagcagtcattacttagaatgtctttttgtgcttgcgcgcacgtgctctctctctctctctctccccctagctaaaccttggctgggggaaktttcygcawtttgctaaagcyaagattgtacctcaaatgggttatagagccccaagaagagtttcaagctacacttcgcccactaaaactttggggaaaagaggctgaatgcttgcaaatggaaaa

SEQ ID NO: 166 - DNA, 505 bp, Homo sapiens
tctcgttctatcagcagaatttggcacaattgatttcaagcatttggtacaattaatctctctttctaccttgaaacattttcttcacttggagttttagacagcacactcttcaggtttttcctctctggatgttctttttcatgcttttttgaaaacaattttattaccgcctcccaggtctgctccctctctgtgacttctaaacagtagagtgattcctcagggatcagtctttgaatgttctattctcactcccggaatgatcttccatggctttaaattccacctataagctagtgacttctagtttgtatctactgctcagactttgaattctaactccaaactccttccttgkcaatttgacttcaatgtttaataaggcatcccaaatttaccaaaaatgkactcctgaaatgsctcaaaaacttgggtttttaaacaatcytcycaatctcyttcytccagatcccaagtcaagtaccttaagattttgcctttg

SEQ ID NO: 167 - DNA, 475 bp, Homo sapiens
  misc_feature (472): n equals a,t,g, or c
ctttgaaacaattgccaagtagcagaaatttttccaatgttcctactggcatccaggtaggcaggaacagggtatgggtcaattgctatttcagtcaattacagcagaggagatagggtctaagggacatttcactcctaatgttttaagtttggcagctgtggtataggtgtttgctaatagtgaataataaagcataatataaataggacagaaaagtccagtgagatttttgtcccttcctaaaggaattttgtcttagcagtgggartcaacagcattactgtcttgcttgccaagttggtatactgcccatctgtgttatatcaattcatctacatgttactgaaaaatgttcatttcactttcagcctgctcaaaaatgttttatttaattccaatgttgctataataaaaatggattgtttaaatggcattgaatttttattatactccccaatgaaaatgcccntta

SEQ ID NO: 168 - DNA, 343 bp, Homo sapiens
ggcagagtaaccattgatttcttttaatcttgttacatactgaatgactatgttgaagattaatgactaaaaatactttacattgataatttgaaattatccttttwattaattatattaatgtaggaaataatgctaaaatgcattcttgaaattgtgttgaaagtattaatgaaaccgaatttcctttatgctttttytgatattaagggtatcatcagttgtgtcacacacctcatattgattccrtgtgattgattcagatgaaaatggctctgtcggcagtgtgtttttgcaacaacamcaaggtgtattttaagtgtttgggctaaagccctgtggg

SEQ ID NO: 169 - DNA, 503 bp, Homo sapiens
  misc_feature (428): n equals a,t,g, or c
  misc_feature (450): n equals a,t,g, or c
ggcacgagccggtgccagtttgtttaactgctagagttgcaggaacattgtgcagataataaatgccagcatggaggaaaccttggcatgggacagacaaacaggcccctcttgccgcctcacaggcaagactgttcatcctcaagaccacggggcatcaacatcaccatttaagaaccatttttctgaaaccaaagactcttttccaagctggtatcagtagtattaccaatttagtaactctggatggagtcaaaccagaaattaagtgtttctagaagtcctcgtgggctgtcagtcctgcccaggtgtgttgttctctcaggattctctgggaacattgcttctgtactagggtgctcttaggtctktagaccctgctttgagggttcctcctgatgggttctgctgagcccggtaaaccttanggttatttctagtatatggtanttaggacttccaccatagtttcaggtattttttaaacagttttctgactggga

SEQ ID NO: 170 - DNA, 437 bp, Homo sapiens
  misc_feature (79): n equals a,t,g, or c
  misc_feature (291): n equals a,t,g, or c
  misc_feature (345): n equals a,t,g, or c
aatctgagcgatgggtctttggaggttggttatatagctttcctctttttgcgaatgtgtgtattttccataattaagnaaaattcctcaggagaagatataatttactcatccctaacaatgtaaaaggtaaacaggttagcttggtgacttagaacacagtactaatgagcccaaagttgtaggacagttcacttcacctgacccctggccacagatgttatttttgaactttgcatcaactctccaacaaatgccttgccatggttagaagggcaaccaggtaaaagnaatatggttaaagttgccacaaaggacaatagcagcaagccccatggttataantcctggtatttccattttggaagagctaaactaaggctcagaggaagttaagggacttccctaacttttgggtggcatggttaagcttgaag

SEQ ID NO: 171 - DNA, 374 bp, Homo sapiens
  misc_feature (367): n equals a,t,g, or c
tgattattaattcaatattccctcttaattaacatgggttaaggaataaatccctaatatatacattatttaaatgtacatgaaaatgaaaacaattgaaaaacctgtgagtggcagtaaaagttgtattggaagttttataacctaatatttgtgcatatattgtaatactaggaagaaaaaatatagaacccaaggaactaaaacaagctgaaatgaattgtgggaggaaggaggtagtattattttaaaaggcagaaataattgaaagaaaaaaactggatctgratccaaaattgrtatttgatggaagrggaaaaaaatgagacaaagtttagtgattccagaggtgaaataaggatgacanataaaca

SEQ ID NO: 172 - DNA, 472 bp, Homo sapiens
  misc_feature (407): n equals a,t,g, or c
  misc_feature (428): n equals a,t,g, or c
  misc_feature (445): n equals a,t,g, or c
aacccatgttgggtcaaggctggttttgaaactccctggaccctcaaggtggatcaagcccgcctcggcctccccaaagtgctgggattaacaggcatgagccgtcatcccctggctggtggtttcttatgacgtgaaacatgcaattaccatatgacctagcagttgcactctgtatttatcccagataaatgaaaactwaccttccaataaaaacctgtgcacaaatgttcatagcagcttaatattgaaaaactggatgttcttcagcaggtgaatgaactggttcattcataccatgggaataccattcagcaataaaaaggaacaaactgttgatacatttaaccacctggatgaatatcaagggaattattgctgtccagacaaaaaccagtccctaaagnctacatatagtatggttccgnttggataatattcttgnaataggggaatttaggggaaatggaaa

SEQ ID NO: 173 - DNA, 296 bp, Homo sapiens
  misc_feature (6): n equals a,t,g, or c
atttgntcccccttcctactttttgccttccctgtggctgctgtttctatcctccagccagagagctagtgtttattttctccattgtgttacacacttgtgcagctgcaaccaccatatcccagggcccaatggtaggaggtagagaagaaaagcaaaagggattggcctcatcctcttacaacgatagttccattgaatagagagaaaggttttcctgcctcaragtgttggctgcactaggcttttgttactgtagtctggccctgttaccatgggattgcttgcatgtgggg

SEQ ID NO: 174 - DNA, 356 bp, Homo sapiens
tcccgggctgacggtaatagaggcacctacaggctccggtaaaacggaaacagcgctggcctatgcttggaaacttattgatcaacaaattgcggatagtgttatttttgccctcccaacacaagctaccgcgaatgctatgcttacgagaatggaagcgagcgcgagccacttattttcatccccaaatcttattcttgctcatggcaattcacggtttaaccacctctttcaatcaataaaatcacgcgcgattactgaacaggggcaagaagaagcgtgggttcagtgttgtcagtcgttgtcacaaagcaataaggaagtgtttcttgggcaaatcggcgtttgcacgattg

SEQ ID NO: 175 - DNA, 478 bp, Homo sapiens
  misc_feature (89): n equals a,t,g, or c
agtggacatctagttgtgatagaaagctaggaagtgctcaactaatggggtcatgttgaaaagacagatggtagcatcaagggattttnactggccaaattttggggtaatttgagtatccaaaaaaaatgaatgataatggatcccatgtaggaggaaatgacagaacttaggaaaatcmtcattttgtaattctcaaagtaatagttgatgcaggcaaagatcatcagtggcagctaaaacttctgtaaaaagttgttgggaaacmtcaaaagataccagctgctgttgaaaaaaaaaaaaagttgttgggaaaagttgttaaaatatcaccccacagatcagtttttaattgcaaagggggaaaatttaccatttcaatggagagacctagtggtcaccatctaaatcaagtagtcaacatgtatattatcactagtgagataagcagtacccttatgtagtagtcctaaggaaa

SEQ ID NO: 176 - DNA, 734 bp, Homo sapiens
  misc_feature (613): n equals a,t,g, or c
  misc_feature (630): n equals a,t,g, or c
  misc_feature (711): n equals a,t,g, or c
ctctgcagtaaacgtggacattggccgtttcgtgggtttgttttcactctgccaagtccttgaggcrtacacttttgtgtcactcatttatcttgaaagaaaaggttaacagcccaacagagtagttcgctttggtatctggagtggtaatcagagtgccagaactggagagaacattgccgtgtacagatgtttgccttttaccagggcactgaaggcataaaacccttagttaatgcttaactgagtgaaccatgaaagtcatgtgactccaaaggtcgactctagaaatgcggcagtccatgtagcactgtgatgtagaaattctatgatatatgggtcagtgttcacaggcagggagagggggagtcttcaacatctttgaattaaaaagcatctggggcaaaaacaaataaatacacacatatcagtgaactgctttaagttcagttagagaaggtgagattaaagaccagaagaaactcgagggagactgctgtataagtcccagttatctttccaaacagacaggttcatcacagcagtgaaggctagtcttcatctcccttcttgtggggattttctacatttaatgtggcagatcttgcccttnggaggatggggggcgtngcattgattgggggctgtgggttttgctgggagttttcatctttacttggaagtttgcaggacactgtgggggttttcctngtggaccattgggttttaccact

SEQ ID NO: 177 - DNA, 413 bp, Homo sapiens
ggacgtctttgctttcacttgcccaaagtgaaagagacaggctgacagtttccaaatgaataaataacagaaaaatagagaaattttaatttgcaaacttactgtattcttccccctcacttaagccagagtagtgtttttcccatcgcgctcttcgctctagctccggtgtcctcccaagctctgtgctgctgttgccagcgtatcaacctctctgtcttcttcgggtctaagttgtattggcctgaacgagtttttcagatcccagagttaataatgatactgtgcaccacagagtgcaggaagcgcacacgttcatttgatcgtcccccgcctgcaggcaaggcagatggggaccccacgttttgctgctcagactctctcccactgttggttccttgtatgttcgtatc

SEQ ID NO: 178 - DNA, 388 bp, Homo sapiens
ctggtgttatgtcatcggaaggcattttaaagcccaggtattgtatcaacataaatgtkcttcattgccttgcacaatgagttcttgtaatcattcatcagagggtgactgaggagtctgcctctgcccttcaagaagccacagctcattgtctgcacttcctttcattgccrrctggggagagcttcagaaaggaggaacataagcattgggatgcacgaggaggtgggtttatgtaggtgattaatgcagttccataaaaagagcttctctaggagaacaaagtgctacttcatttgtgggaagacaagattgaagaagagctctcttttaatgcactagtcaggagcagatgaatagatatattggcaaaactcccttcctagga

SEQ ID NO: 179 - DNA, 374 bp, Homo sapiens
  misc_feature (63): n equals a,t,g, or c
taaagcttgaacacaggaacactacaactgccagatgctgaggagaatcaggaaagcaatganctagactctttttttagtcaattaagtgggttgttttagatgtatagagtattgatatgagttaacactttttagtagatggcaaagtgggcttgatgttcaaaagtaatgttcgagttakggttcatggtccctttctcagtaattttttcttaataaaagtaaacactggttcaaagacaaatagcaagtattccctcctgtgctatttatagagggctcaattcgtagaaaggcataccctccaatgcaattctgtggctgtccttacagtggtttcagaatcacgaaaaaacagctagtaaataggg

SEQ ID NO: 180 - DNA, 567 bp, Homo sapiens
  misc_feature (258): n equals a,t,g, or c
  misc_feature (459): n equals a,t,g, or c
ggggattggagagttgaaagggttttcgggagcatstatttctctcagttctcctgctttgcctctggctactgcaggctgctgccttgcatttggtgaaagcctcgygctttctaggaggggatttctttcagctttcctgccttacccccagtgtgtaatggggactgccttgcaatggatgaacctcacatgccttggagaatccctcttgcttctcctgccttgcttcctgtgctcagtgggctactttcttgnactttgggaagacctggtgtacctggggagggtatttctcagttctcctamcctggcaccagctttcagtgtacgactcccatccactcaatggaggctgggtgggtacagactagttctattcctggggtaccttgtgattctactctgttatgccaacccatatacaatcatccaaaatttgtttaaagataggctggnttctcccttcctcttctgtgctccttccaacatgtccctaggaacaaaagcagctgtgggactcttctctctaggaagagcttgatccttttggaaatgtagttaatt

SEQ ID NO: 181 - DNA, 212 bp, Homo sapiens
  misc_feature (192): n equals a,t,g, or c
attcggcacagcaagatctcagtaacctatgggtccgggtaacagggctcgacatagtgagtttcagtgtgcttgagcctgcgttgggatgtgctgtggccatgagatgtaacaggtktgtcrggcacgtgttagcttcctggccagctctggaagtgcaaagccagccttggcctcctcacctgtaaggtnagagctggtgattgatgagt

SEQ ID NO: 182 - DNA, 462 bp, Homo sapiens
gccagcccctgcccacttacgatgaggtgctgctctgcaccccggcaaccacctttgaggaggtggcactgttgctgcgccgctgcctgaccctgggctccctggggcacaaggtctacagcctgctgttcgcagatcagctgagctacgaggtggcacgccaagcggaggagcttttccacaatctgtgcacgcagcagcaccgagaagactaccagctcgtcatggtctgtgatggggactgggagcactgctacctcccctctgccttcagccagcacaaggtcttcgtcaccccccaggcacccctcgaggccatccaagcctacctggcaggtcactaccgggtcccgaagcagaccctgtcggcggcagccgtgttcaatgaccggctgtgtgttgggatcgtggcctcggagcgagcaggtgttggaaagtctctgtacgtgaagaggttgcacg

SEQ ID NO: 183 - DNA, 322 bp, Homo sapiens
  misc_feature (28): n equals a,t,g, or c
  misc_feature (258): n equals a,t,g, or c
  misc_feature (321): n equals a,t,g, or c
gaacagtcaagggttttggacttactgnaaaggtagataacgattcaaatttaattaattagtcatattggataactaaaatctacccagaaaatgtgagaaaattacaggcactatacatttctcttcttctggtgagtgaatcaggtatctcctcacataagatatgagattatattgtgttatacttatttaattttgtgtgatatttcattccatagaaaataatggcactaatataaaacataattaatccanaaaatttggttatctccatcttgaaaggctattgcttttttatgcaatgaataaaaaccagtna

SEQ ID NO: 184 - DNA, 152 bp, Homo sapiens
ggacgacagggcgaggctccgtctcaaaaaaataaaataaaataaaaaagaatttaaaagttgtttgccgggcaagaacatactctctttcctgttaaaatggscaaaagaraamctctttctcccgcctttctaccactgagcagtgtagt

SEQ ID NO: 185 - DNA, 448 bp, Homo sapiens
  misc_feature (134): n equals a,t,g, or c
  misc_feature (385): n equals a,t,g, or c
  misc_feature (419): n equals a,t,g, or c
  misc_feature (424): n equals a,t,g, or c
ttcacaaaamtgttactgcttcaaaggcttggcattaacagtgatgtcagcattcatactgccaacartctgctggtcatacatggaagactgttaaagtgtggtctgtgcatcattgagcaattgttatgtanacacaaggcctgcttcactcaggatagcttgctcctctcgctgagaagagatacctgaagtctactaagtctactaaatgagatatatatgtgtatgtatatgcctatatatattattatatttactagtgttttgtgataatgtttataaaaattaataagattgttttgttttgtatgaatgttcgacaaatcgagttgttccaatgttattgaatgaatgttcttactgtaacatccaaagctgtccnacccatgttgttaaatgttccctggtccttttgnatccnctgaacactacttttgctggttcc

SEQ ID NO: 186 - DNA, 482 bp, Homo sapiens
  misc_feature (92): n equals a,t,g, or c
  misc_feature (100): n equals a,t,g, or c
gaaagaaatgaaccccctccccactcagctctccacaggtgccatcagtttcctgcgctctctcctggaaccggatcctgtgaagaggccanatattcancaggcactggcgaatcgctggcttaatgagaattacacgggcaaagtgccctgtaatgtcacctatcccaacaggatttctctggaagatctgagcccgagcgtcgtgctgcacatgaccgagaagctgggttacaagaacagcgacgtgatcaacactgtgctctccaaccgcgcctgccacatcctggccatctacttcctcttaaacaagaaactggagcgctatttgtcagggaaatctgacatccaggacagcctctgctacaagacccggctctaccagatagaaaagtacagggcccccaaggagtcctatgaggcctctctggacacctggacacgagatcttgaattccatgccgtgcagagataaaaagccc

SEQ ID NO: 187 - DNA, 441 bp, Homo sapiens
  misc_feature (188): n equals a,t,g, or c
gctgccttttccctcatctttctatgtattccaggactttgctgaagaattagcaacactgtctaatctgtttctagccgagccccacctgccagaaccccagctaagagcctgtgagttggtgcagccaaaccggggcactgtgctggcccagagctagggctgagaagtggccctgccttgggatntgcaccagaaccctggacccccgcctcacgaggaggcccaagtgcccaatgcagaccctcactggttggggtgtagctgggtctacagtcagacttcctgctctaagggtgtcactgcctggcatcccaccacgcgaatcctagargaargararttggcctgatttgggattatggcagaaaatccagagatgccagtcctggaktaraaragtggtgtttgtttatctcttggatactaaatgaatgargt

SEQ ID NO: 188 - DNA, 468 bp, Homo sapiens
cggacgcgtgggcggacgcgtgggctgtagtgtcttttaaaaataatatagtattgcatgtttgaaaaattgcatgttttcatagtggttcattcagactgaaaagagtgtaagtagaaaattttgayctycttattaagattaaacyccaaatgagcaaacttgcttctgcttaaagcaaactccttgacaattcttccagactgggctgaggagggtatgtgaaaagtatgagacatgtctctgctgtcagagaaattaggaaaggattgttgacaacatacataaaactatcaaaaattgaaaactatgcaagatagtatacaactaaatggcatattggctttaagtgttgtaggagttcaggttgattattttartctaagcctccttttgarggcagctgggaattgagattccttttttttctgatgcccttactgtttgtctcattgaattagagcttgt

SEQ ID NO: 189 - DNA, 450 bp, Homo sapiens
  misc_feature (428): n equals a,t,g, or c
  misc_feature (432): n equals a,t,g, or c
  misc_feature (440): n equals a,t,g, or c
gtttttctcaagtgactttgaaggtaatgcttttgcttaccatatttccaagatggccacgtctgtgcccttaagcaaatatttaatctctgacctgattttccctcatctgtgattacatcacagtttgaggatcatctgtgataacgtgaacattctgtgtatatagtaggtagtcaacagatgtaccctgtgaggctcatcttttattattctttgccacattctttatagtgcctttagcacaaataagatccagcatcttaaacagatttgcaatgaggaaatattttgttttagggtaaaaatgttgtacatcagctctcagtaaccctagrargacttatataatgggtgcaacaaggaaaactgggctctgcaaaaggaatgtggatttgtggaccaatgtgragggtggasggwgggtnaggnagggagcngttggagtgc

SEQ ID NO: 190 - DNA, 395 bp, Homo sapiens
  misc_feature (342): n equals a,t,g, or c
caacagagtgtcccgggactcaggcctctgatcaagttacccccagaggatcagagaggggttgacgaaggagaagcattcagagggcactggcttctggacagcaatgagtgcccgggccacgcggcccgaagccggcgagggaggcatgctccacccggtgaactggatcccgtggctgagagttcagaggaggtcgaggcagccagtgggagctccaagcccagctttgccccacctccggtgagctccgggctggagcagctgggccccatggaggaggtcagtggccaaggcytaggaagcaggtaagacccgcttggtctgtgcccttcactccantccagacgcatctttgccatccacagatctgctgatgtgcctgctctgctcac

SEQ ID NO: 191 - DNA, 699 bp, Homo sapiens
  misc_feature (23): n equals a,t,g, or c
gcagatgtgagttctgcatccanttttgcaatttatccatttacctgcctgagacttggaaacacctactttatagtcctgattcaagtgttggcggatggaagggaggagactcctgaccctcaraatgagatcaatggcttttcaaaagcagcacaccaaactgtcaaagtggtgatccctcttcatttgacatgctcacaaagaggagaataagacaagaaagcaagctaacccagaaacagtgaggtgacagtgcgcctcaaacacaggaaaataaaatgcataactatactgattggatgctgctcaaaatcagcctacatgccatctttggtacgtgtgaacaaagttaccaattcctattctaactatgatatactcaaaactgtacaatcagtaatgggatgctctaaagacaaaagaactgcaaaccctttttaaaaaattattttcagtaacagtgttactttttggtattaagattgtaagaataccttgtggataatgtggaacaaaccaaatgaatacttatgtgaatgtgatattctcaaattatcatccctggtattccagagtaacaagattcttggtggtgacagaaggcaatacaaataagatagaagttaaataaaaaccttgtagtcttcaatttaaataaaactatacgtataaaactttaatttaaaaaaaaaaaaa

SEQ ID NO: 192 - DNA, 436 bp, Homo sapiens
  misc_feature (331): n equals a,t,g, or c
  misc_feature (427): n equals a,t,g, or c
ttttcgtccctttcacggtgtatcaagtaaggtggcttcgtcctgttcatcgccaactaggggaagcgaatgaggagtttgcactccgtgtacaacaggtggtcgggtgcacagacagggtggaggcggggtccctgcttaggaggagagggaggaaagcttgagatcttgacacttccagtcttccaattctccctagctggtggccaaggaattgggccagacagggacacggctcactccarctgacaaagcagagcacatgaagcgacaaagacaccccagattgcgcccccagtcagcccagtcttctttccctccctcccctggntccttcttcctggatgttgcaaytggcactctkggtcararartcaaggaartttttgccccatgttkccattgggtgttcattccagagagaccngggccaaga

SEQ ID NO: 193 - DNA, 159 bp, Homo sapiens
  misc_feature (39): n equals a,t,g, or c
tctgacctagttttgaaccctgggtacaccaattttttnttaagtaacttcagaaaagttacttaacctatctatgcatcctaaccatctcacctactaagtggacatcctcattaaggttgccatgagatttagatgtgatgatgtatgcaaggtact

SEQ ID NO: 194 - DNA, 654 bp, Homo sapiens
gcggccgccctttttttttttttttctgaatctgaatctcactccgtcgcccaggctagagtgcagtggcactatcttggctcactgcaacctccgcctcgcgggttcaagtgattctcctgcctmagcgtcctgagtagctgagactacaggtgcctgccaccacgcctggcaaatttttgtatttttagtagagatggagtttcgccatgttggctgggctggtctcaaactcctgaccttgtgatccacccgcctcggcctcccaaaatgctgggattacaggcatgaggattgctcaagcccaggagttcaagaagagcctaggcaacatagtgagaccttgtttctacaaaaaaaattaaaaactgaggcaggaggattgcttcagcccaggaggtcgaggctgtgatgagccatgatcatgccactgcactcccacctgggtgacggagtgtggagaccctgcctcaaaaacaaataaataaaaaagaaagaaagaaatgatgaagaaagacaccaaaagaagagactgcatgttcttctcttttggtttcttatagcttgcaggctgacacctgttccaaatggtatcaaactatttagatctaagtttttaagaaagtaggtaaaaagatacctgttttatcggac

SEQ ID NO: 195 - DNA, 1119 bp, Homo sapiens
  misc_feature (14): n equals a,t,g, or c
  misc_feature (32): n equals a,t,g, or c
  misc_feature (44): n equals a,t,g, or c
ggcactccctcccnaagtacgtggaaattatnggcataagccanggcacctggcctccctaaacttatgaagtgtcccaacttgtaawagactttgaaacatatacaacttgttggtgcgtccccaggccaaycctcacatttggctttgattagcctttatcaaattattctgcctcaacagacttaattttggtcaacaatttaactgaggtactttatagataacagtgtccattataccacaggaaatacttcagtgtttaaataatgagaaaagcaaaagctgttcccaatgacagctgctccccaactcaccacaaggcgaagtcttaccctgttgaaaactgtaacaaacctccatcagacaaagctaccargtgaccataatggatcaaaatgaaattctgtaaccatgtctccgataacctaaaagaaaacagacttcaaactttaaaaatgaccagaaatctcctaatatgacttgtgcttcttatgaattartgttagtgccactctatyctttctgcctcctagataagaactattagaattttccaaggatggaattgagttcacctaacagcatccaatacaaacacctcactttgttgaatggcaatgaaatcacctaaaagaaacacaaatcctataagaagtcctcttgagcaccctcttatggataaccctccgtcattgatgctttgtgttcatccttatkacaactctttacatgccactctttgactataggtgtgattctagtggtctctggcaagatggcacagacaaaagcatgctttgttcctgtggtattctaaatgagaaattagattcatgagaaaaattgtgaccatgtaagaattttaaaaaattttttcctttacattttctttaacattttttaaagaaaaaaagtacttggacttatatgcaaatggtaatactgactcattatttagaatgtataatgaataacctgacaaaattacaaagttgacctgaaaatgcataattgcaatgggatattttaatatatattctcaggtaatggaaaatattaatacaatagttgttagtatacaagttgttttaaaagagttaataaaatatttctaag

SEQ ID NO: 196 - DNA, 566 bp, Homo sapiens
  misc_feature (497): n equals a,t,g, or c
  misc_feature (517): n equals a,t,g, or c
  misc_feature (545): n equals a,t,g, or c
  misc_feature (555): n equals a,t,g, or c
  misc_feature (560): n equals a,t,g, or c
gggagctatgtcagacaggtagtagcagctctgtgtggctgactctccactggccctagcatttccctaaacaattggaagtaggagggtcttgagaaggggatccccctctgtgaagccccagcaccatccaaggtcagcaggggcctcgttcccatgcccagaggcagggtgagataaggggctcaggtctggctgtcccaggctgctcctggggcccagccagagggggcagaggagccgaggggggagttgggggggatctggcagtcccagccctgcaggaagtgtttgtgcatccgccccggcggaacctggctcccaatccccgactgtgagaccgcctgttcttccttccagtccgaaggagcttacgacatcatcctcccacgggccaccgccaacagccaggtgatgggcagtgccaactcgaccctgcgggctgaagacatgtactcggccagagccaccaggcgggcacaccgccgaaagacggnaagaactctcaagtctttanaaacccctacgttgtgggactgagtcancggtggcgangagangcggtc

SEQ ID NO: 197 - DNA, 227 bp, Homo sapiens
  misc_feature (222): n equals a,t,g, or c
  misc_feature (225): n equals a,t,g, or c
ggaaaaggaaagacagggtaaatctttgtaaaagggatattgaggatataagcttggaaaagtggacacatgatcagaaagtcaaatagaaatagacagctattcacctggaaataagaggtaggttatttatgtttcagattaaagaaagaaggttactctctaggatagagagcaggtctgtgtttcaagcttggtttgcaagatgtactcaccattgancanga

SEQ ID NO: 198 - DNA, 536 bp, Homo sapiens
  misc_feature (452): n equals a,t,g, or c
  misc_feature (467): n equals a,t,g, or c
  misc_feature (484): n equals a,t,g, or c
gatgacagaaagtctaaaagtagccttaaactttgttccaatttcgttatgttattaaataaaaaaacgcaaggcatctaacaatatatgatgctttcttttatatgaaagaaagaaaaggaagacacacacacgcacacacacccctgagtttccacagctaatggcagagccatcaggaatcaaagtgggtctctgttcaaccccatcctcttcccatcaggcaccctgctccggatccctcagctcttctcgcctatcartgggtaggcattagggtctgtactgccattattaatgggctttactttgaaagtgggtgtaaaccagacccttggaaactttttgatgcagtatctgctctggagacccaagaggggcwaatgtaawtttgaawtgtgattcycyggaaagtactaagagctttggaattaatttattggattgatgtngaagtccccaagttnatcttttctaatgccanccaaaaatattgacaggtaagaccagaaacccaagggctaagatcttgtggt

SEQ ID NO: 199 - DNA, 653 bp, Homo sapiens
  misc_feature (581): n equals a,t,g, or c
  misc_feature (617): n equals a,t,g, or c
  misc_feature (627): n equals a,t,g, or c
cccactaggatttgtttaggtgcccattgcatctttttgtgctatggagttgtttacattaagcatgaccgaacgagagacaatactatttcccacaggagtccattgggttcagctttgaaagaggaatagaatcgaggctcctttgaccatcaaaatgatgaactttacttatgtggtacccaatgccagaatgtaagagttgcaagtgattttgtgctgctattcattaaaacttgtattccagtcttgccagcttaaggagatcaagatattaagaggtatccttgatttattttccagtattcagtagtaaaattttcctgtccactgtgaatcaaagcctgagtcactctatttaaccttggacacactaataaggttttattttgattgtgttcctttccccccccccaatagtaaaatttctcctcctttaactcctcctaccccccaagggtaaggaaacaaaaaacaaacaaacaaacaaaaataggaaggacaaaaggaaaggacatatggaaagggattgtaattgggcttaacaggaaacagtctgktaaaaacctaacmgtgggkgncattctgttgtctgtggtgttatgtgggggtttttntcccaggtcnggcgggtatgacatttaccgttaata

SEQ ID NO: 200 - DNA, 442 bp, Homo sapiens
  misc_feature (388): n equals a,t,g, or c
  misc_feature (390): n equals a,t,g, or c
  misc_feature (399): n equals a,t,g, or c
  misc_feature (411): n equals a,t,g, or c
acagatatttaataaggaaatattccttcctgttcccactttcagggaggcctcttaagacatgaagaggaccaaaataacaattgcagtataacttcacatggtggggtggggggtgtggagttcaaatgtggttgatcaaaatagtgttgttactttcctttagacttgattccaacatgtaaaaaaatcaggcactttagtgggagtgattttaacttcagtagtgaaagggcaatgcaattaagagttagggtagtgtttctcaaacttcatcctcagaggtgctttagaaattgactacctttggtttgaatttatttttagaaatatatctcttttccagtatttttaaaactgtaaaaggtaaaccagttttccccaaagngntaaatgaantttaacccatangtttccagttttaaccagtggggtggacttt

SEQ ID NO: 201 - DNA, 472 bp, Homo sapiens
  misc_feature (426): n equals a,t,g, or c
  misc_feature (439): n equals a,t,g, or c
  misc_feature (470): n equals a,t,g, or c
gaatgcgctagttattacttacatgcttccactgagttaataatgtaagtattatgtaattatttggataacatgtgacatcgttgatcttgagtaatgttctgctgggatctcttttgtttagtatgcatggatatttccaagtaattagacctatactactacacttccttaatgctatccttcccataagtgtagttcttacctttaaccagtattttatgagaataattattttccctacaggygatccattttctcagcctattaaatttcccataaayggactctcagatgtaaaaaatacttcggaggacagtgaaaacttcccatcaagttctaaaaagtctgaggrgtggcctgactggagtgaacctggaggagcctgaaaatcaaactgtcaacatacagatttgggcctagagnaccttgtgatgangtcaagtcccagtgcactaccttgggatgtngg

SEQ ID NO: 202 - DNA, 372 bp, Homo sapiens
  misc_feature (325): n equals a,t,g, or c
  misc_feature (333): n equals a,t,g, or c
  misc_feature (341): n equals a,t,g, or c
cccatccccagtagatcttaaattaattctttattgtctgtattcatgagcagaaagtaggaaatgtgttcttcagtcccaggcgtttcccttctcttcatcacggtattgttccttccaggttccactcaacttagtaattttgtgagtttctgtatacaaatgtaaaattggggttgttggagcctktcaaatttctcaacctaatgattaagtttaactagcctccggccggggcacagtgggctcgtgcctgtaatcccagcactttgggaaggctgaggcgggcagatcacgaggtcaggaggtcaggagatcgagaaantccgggtnaaaacggngaaccttggccctactaaaatacaaaagatt

SEQ ID NO: 203 - DNA, 391 bp, Homo sapiens
gcctctggtggatgggtgcagcggcggcgcgaggaccgagaagaggagccccgggggtagcggcggcggacgaggggcgcggggaccgggctgtctgaggtgcgcgccgtggggctcgcgctctacctgatcgcgctgcgacgctggtgcagctctcgctssagcagctcgtgctacgcggggcsgctggacaccgcggggagttcgacgcgctccaagccagggattatcttgaacacataacctccattggccccaggactacaggaagtccagaaaatgaaattctgaccgtgcactarctttttggaacagattaaactgattgaagtgcaaagcaacagccttcataagatttcagtagatgtacaaagggccacaggttctttta

SEQ ID NO: 204 - DNA, 604 bp, Homo sapiens
  misc_feature (525): n equals a,t,g, or c
caaggttaaagctgaagaaagtgaccttccattaaatcattgctttttatttcagtgatgttttcctttcctgagggattggcaggatagtgcatggtgtttatgtgtagcttcttgcattcctgagtgccttacaagattttcatgggaatacatttagttggcatattataaagagagcatactcctaaaaagatgtttatcattttctattcttgagttggtcaaactagtctttactacttacagcaagttcaaatatttggcattggcaaacacagggctttcaatattttaattgaaagtttaatgctgactgactttattagatgcagttcaagaatccagttaggagaaatacataatttttttccattcaacacataagacacagagaaaaagacmtttgcaattawttctaccttggcagagawtttamcttctgtatggacgtccaattatgtaggtcaactttacccttttggccagggcatttgtttcttcggcatttcagcagggtttctngctgggcttgggtattctttcagaggaggcacaacaatggaccaggtttttttccggatggaatttcaagtggaccacc

SEQ ID NO: 205 - DNA, 897 bp, Homo sapiens
  misc_feature (22): n equals a,t,g, or c
ccgggtcgagggcgcgtcccgncctatgcgcccagagggtatcaacgcaccccggacccaggccgcaaactttttagcggccgccttagggcgacctccccaagcttctctaaacgattctccacccacacaatttgttcgtagccaatgtgtattactacagagcggccaggacacatctcaagcatctacactgtggcagcagcatcaggtgcagtatgatgcctagaattccatgatctgcttatcccagtacggagcccaggacactggatgcaccagactgaacgtactggcctagaacttcattctctagcaattgtcaccaaggaagtccccaaatgacctggcactaatgtggcttttacctgcatatctcttgttccttttgctggtctttgctgagttgtatgtctgttttgatgctgaagatgtgacttttgggaaaatctcctgggatcagctccaaactaaacagtgaaatatttgactactgtctgacagaagaaagacaaagtaaattcctgtccggagagtcagctatcttaaaaggttcatggcactacaaggtggcatctgaaaaaccatctctctagctaaagtccattcaccaatatctgttatgaatgactaaggctgtacttagtcatgatagccacatagggcyatttaaatttaaataaatttctatatgttcataaatgctaagaaaaatgaaattcatagaggcagcatcttgtaactggatatactcatgaaggctgcatactagattaatagtattaatgcttactattcttctactgatttttactagattgagaatactaagggccccatgttggcttamttaggagagattagtagaaattttgttttcaccagtcmttggaaaaa

SEQ ID NO: 206 - DNA, 469 bp, Homo sapiens
caagtatttattaagctagaggtcatggtcactgaaattactttccaaagtggaagacaaaatgaaacmggaactgagggaatatttaagatcccacagaagcgtaaaaatgacatggtagaaagtaatagaaaacctaaatgtctgtcattaaaggataggttaaggtgtggttcagccatataggaatatctcgtatctgttaaaatgaataaagtacattcattgtgtatggaaaaatggccatgatacattaggtgaaacaagttattaatagaaaagtgtacagtgtgaactcattttaaaatgtgtgtgcttatgtttataaatgcatagaaaggtctattcacagctttctttgaacagtgtagatcacatgaaactttcaactttatacatttctgtattaatattttacactacccacattatttttaaactttattttaaataaagaatttttaaaatt

SEQ ID NO: 207 - DNA, 476 bp, Homo sapiens
  misc_feature (31): n equals a,t,g, or c
  misc_feature (64): n equals a,t,g, or c
  misc_feature (411): n equals a,t,g, or c
  misc_feature (458): n equals a,t,g, or c
  misc_feature (466): n equals a,t,g, or c
cattagtaatccctgtcaagggtaaaaaaancctcccttgttaggaatcaaagcaaaaagctcnctctgaggagtaatgaggaatatactctttctaatatgatgcggaagcacttaatatttgttattggtgtttacagaaatgattacttctcaaacattgctgcttacagaaatgattaattctcaaactatgccgggaaggtgagtatggtaatgattttacaagggaggaatctgaagtgtaagaggaatcatgtcttgccccaggtctcgagctaatctgtggcaggtttcggggcggtgcctgctcctccgagcctgtcctgggaactggccacactgccctgggttcacagcaccatggggctctgtgcgtgccgttccacatactcttctcccttggacagnttgcacgtccaaggagaagctaccagcccacgcttcttgggcaagancctttccnccttggttgt

SEQ ID NO: 208 - DNA, 526 bp, Homo sapiens
  misc_feature (379): n equals a,t,g, or c
  misc_feature (436): n equals a,t,g, or c
  misc_feature (474): n equals a,t,g, or c
  misc_feature (483): n equals a,t,g, or c
  misc_feature (512): n equals a,t,g, or c
gtgaaataatgctgacaaaacttctaacaagaagcactactcctgcccctgattctccccagaccagtttccagagacagtgaatcatttggactatttgagctgtttctttgattttgcctccaatttttaaatattaatttttaatgctttttcttgatttcgcctgtttcagaaattatcttttgacttcctgttttggaagttggacgtgtagctcttgccccctccacccacctaactcrctacttttcctctccccttcattccaaaagacctgtttcacaatagtcagtggattatcatgtaaatgatgtttaccactgagccaagaaatgtataatattatgatgagttttttttgtttgttttgttttantttttgagacagggtctggctctgtcacccagactagagtacagtggtggcagtcangggctcactcatcctggacctcctgggaaccaaacaancctcctgcntcaggctcctgagtagctgggggctaaangcctgtggccagca

SEQ ID NO: 209 - DNA, 551 bp, Homo sapiens
cttcaatttgacattcaatgcattcacatcagaaactaagaagataacaagcctgagatgtcaggtgataaaaattcatgtttcttccaaggacagaaggctattagattgtcccaggccatatctattcccagttctttgtgagtagtcttcttactttttctgtggtaggtaagaagcatatttccaccaaaagaaagcatgcattgtttgactagccagctttctagaaaaaatgagatccttgagaggataaacaaatccaacctattcatggtgtcctcacttattgtggtcaattkggaaggcttaaaacacaaaaaatggggatggataactttgaacactaaaattagtggagccaaargcacgtcttcaccatctgttatgtgacttaaaattcaatttcacgaaacccacttccacaagcttaatgaactgtgagctacakgagggcataaaccatgtcttcyttgtatggtattcckgcttcctagcaggacagctggcaaagagtttatcattaaatgtttgctgaattaaaaaaaaaa

SEQ ID NO: 210 - DNA, 627 bp, Homo sapiens
  misc_feature (568): n equals a,t,g, or c
  misc_feature (588): n equals a,t,g, or c
cgagttgttgatctacagccagtggggctgggctctcccaaggcggtggagtgagaagacaggtgagacaccaagcatgaggccgtggcggaggagatggagcctggggcccaactgctgagcatagcagagaaaaagaaggaaaaccaggaggcctggcccgagaaagcccaagaaggagaggattttaaagagcaaacactggacagaagtcaggccagaggaagattgtcaggcctctaagccggagcaaggtccttgtaacccctgtgacctgcccgtatacatccaaatggcctgcaggagccacaaagtctggagcagccaaaaaaaaaaaaaaaaaaaaacccacaaaaagggtaaaacagccagctccttgcattgtccctgccccaactcatcaattgaccttgtgacaatctcctcctgggacagtgagtctcaggagctccccactgagcaccttgtgacccctcccctgctatcaatagataaccacctttaacttgtacctttccactgcctacccaagtcctgttaaagctgcccctattctattccccttggntgtctctctttttgggattnagcccttccgaacccggatgttaattaaacagcttgttg

SEQ ID NO: 211 - DNA, 485 bp, Homo sapiens
agttttttgtctttgctttggaatgtgattggcctttcagttttgtctgtttattagaatcaaggtatatctgcctcatgaaaggtatgtgtttgtttgtttttcctttctattctctgaaagagttttggattatctattcctttagtgtatggtagaacactcctaaaaaacttttgggctggtgttttttaatgggtagattttaattactgattcagtttctttggttgttcaatagtttattcagattttctgtttcttttttgagttagttttggttcyacatttgttttgaagaaattgcctgttttacttattttctaattaatttgtaatatagttgttcaaagcattattttatgattgtyaaatatcaaccgtatttgtaactatgtcttcttttgttcacagcaccttttttyttttttttgtctgagtcccactctawttagcctgggcaacaagagcaaaactctgtctcg

SEQ ID NO: 212 - DNA, 488 bp, Homo sapiens
  misc_feature (38): n equals a,t,g, or c
  misc_feature (103): n equals a,t,g, or c
  misc_feature (486): n equals a,t,g, or c
ctcttgcaaggaatcactgtgtgtgtgtgtgtgtgtanggtgtgtgtgtgcacgtgcatgcatgtgtgtgtgtgtgtgtgtgtggtatatacatgtacatacngatatatmcacacgtagatacatgcatatttagaagtaagggaataaacaaacattgaattcaagaatattgtcataaaaggcattgcctcctccctcacaaaacaaggtgcactaagcttctcaagccctcacttcagtgggctgatggaaatatagccaaagtattttaccatgttttgtaagatctcttggtttagcaaatacattcaaagaaatttttccaccaaacgtgccacaagaattgtgttttcatttctcctgtgcaagtacagaatggagagaaagtaggcaatcagggagagatgcaaagagtctagcaaattatttctagcataatcacacatttaacttcagactcagccttgttttataattccaaanaa

SEQ ID NO: 213 - DNA, 530 bp, Homo sapiens
ggacatgcgtgtatttgtagttcagctaccatctagacttaatcataagtacttacttggttaagggaccaagtgattttctattaaaaagcaattcgtatttttatttctttagttgtagttgctaagtagagctgttgctgatgatgagatgtttcatgctgagataatgaaaaatttactgtattggatcatctcagcagtcctattgagggttatttcacttatttccatgatgtttcaattaagctttttgtagtaaatattgataagagctattattgtacttgcagatctggaattaataagagaccatgttgggggraaactacttgttacatttaatcacaggctcatctgaaagtctttggtgttgtatgtgaagttgtatgttcaattatatagtatacataaaaattataatgtatacataaaaagccactgagatgttttgaaatttattaagtttacgtataataactctcattaaaattattttctataatctttcttgtgaggtctagttgtta

SEQ ID NO: 214 - DNA, 319 bp, Homo sapiens
  misc_feature (182): n equals a,t,g, or c
  misc_feature (304): n equals a,t,g, or c
ttttttttttttttttttttttttttttttttcagtcctagagcctgcagtattgtaatttattgtaaaaccatgtaaccaaatacttaaatatatccacaacatctataccacagaaatgcatagtacataatatactaacatctcaaaataaacttctattacagttttatgcaaattanggtaaaagattatcacctgccacattttgaaatggcaccaacttcaacatcaatkcactastcaaaatccttactagaagtgatgtcttctgcattatcatctgaacattcaaaatcaagcngttaatctaataacc

SEQ ID NO: 215 - DNA, 335 bp, Homo sapiens
  misc_feature (314): n equals a,t,g, or c
  misc_feature (317): n equals a,t,g, or c
  misc_feature (326): n equals a,t,g, or c
caacaagaatttttacccatcagcactactgtggctgaaaaacttctcttcaacagttcagtgcgccctgtgcaggagtcagcccggcatctgcttgtacacacagctccttgcataggtgtggagttagatctggacagtgaacttcaggaagtcctttcttataggaggctaatagggattgagaataacatgagaagaaaacgctaataaagggaaacctgaacacgctgctgtcagcatgtgttttcaaagtgcagcctgcctcagagttcttcggagcctgaaaaggggtttgagaaagagcccagtangangggcaggangccgacaca

SEQ ID NO: 216 - DNA, 664 bp, Homo sapiens
  misc_feature (573): n equals a,t,g, or c
ctggcttgctttgcagggcttccacaagaatcgggctgggagcgtaactgagtaactgagtcatgattaggggttaattaagaggagaaatgggctagctgtttcctaagataagggaggggaagtttttttaaaaactgtaactgctcagaacagtatgtgctaaggcagactttctgtgctgggagacagaacacttctgcagtgatgtagcagaatccttaaaggatcctgccaatgactctttttttctggtgtcacatccaatctttgctgcagccaacacttcctggagatgaaacacaacttcaatacagagatagcaagttcacactctgggcagtcatgcaaggatgagtgatgcgggccttttctaagtgagtatgaaggggtgggacctacggtaaattcaatgcastataatccrtctacggggcagtgggcacccagcaacagccaactgttaccaaatcaaagtgcaggcccaggatgactcatcttccagcacttcctgggcaacaagaggggaactccgtctccaaagaaaaaaaatgaatagaattcagcaatatntggaaagaatttatatactatgaccaggtgggggattattccaagggtgcaaagctaagtcaataattcaaaaatcaatccaatggaaaaa

SEQ ID NO: 217 - DNA, 1246 bp, Homo sapiens
  misc_feature (36): n equals a,t,g, or c
  misc_feature (42): n equals a,t,g, or c
  misc_feature (359): n equals a,t,g, or c
  misc_feature (1207): n equals a,t,g, or c
  misc_feature (1225): n equals a,t,g, or c
tatagaagtgcgcatgcagtacaggtcagggaattnggggtngacccacgcgtcmggtctcctgctgcttagggactctactagccttttacttaaagccagttctgatatgtttgtttttgtaatccaaatatgttcccaaaagattgatctatcaggggacagtttgagtataatgcacattttgtgtttgcttagcaggattttgttcacaagaaacactagtaaacaaagaaaactgtacctgcatgagccggagcatgtagaaatgcacacaatgtacacaggcaatgccgtgagcatctcccagtcactcccatccacagcctgtgtagtgagcccgtcacatctggtgtgangactttccatcgaatttcgtacaaccttctttcctccacttcacaatggctcacaagctgcaaacttcagttcattttcaagatcaagggccatctttattagtattccatctcttaatatgtgtgaaattatgttactatttttatgaggtttctacattttaggtaaaaagtgtccgtgataaagtttgtgagtgttgtgccccaaccccatttttcttcctataaaccctgctgttcctacgacataatcacacatagttacaatgatattttagaaactcttatgtcacatcatagcaaaattgattatgcataatctcatttagtttagcttaattgagacaggtgggtattatgtcagtatttattatgtgggtgttatttktyccaatttgcagctgtaggaattgaaggtcaggttgatccaggtcaccatctactatgtgtagtgctgaaattaaaacccaggtcastctgcttcctaagtgtggctattagccatggtgctttgaggatggaagaaatctacttccttaatactcaggagattcacagagtcaggaccaaatactcacagagcatttgaagatttccagccaacattttcagarcctggctactatccargggaatttaaagtgtgacgcagcccaccaaagttgattgcatcttagagaatggaatccaagtctcccaccaggaaaaatacaggcattcattagttccttcccctaaaaggttggacattgatccaggcactatagagcacctgggatacaacactgagcaaagcggtcttcctccctgcctcactctgcttagaggaccaattcctgggaatgganggggttgcacacattaangaaaggactcttcacagcaaa

SEQ ID NO: 218 - DNA, 628 bp, Homo sapiens
  misc_feature (129): n equals a,t,g, or c
  misc_feature (537): n equals a,t,g, or c
  misc_feature (582): n equals a,t,g, or c
  misc_feature (598): n equals a,t,g, or c
  misc_feature (613): n equals a,t,g, or c
tcgtctcccgggtctctgggggttccccgggaaccgggctcctttggccctttgcccggcctggcccgcgttggtggtactctgccccacgaggccgcggggttcacagctggttgggctcatctcctngaggactccctctcccgcgcagcgcctcatccttsttggtytttgtcktggctttctcgtgywccacattgtagcccttcttcctgctgagtttgcctgtcatctkrgagtttggctctgggtgcctgtgcagccyctgggtgagcgcggtgcccccaagaggccagggtccctggcggtgtctagctcatgcctggccgctggcggaggctctctcctggctccatggcggaggccagagcgaggagccagttgtagtgctagctccgcctttgtcgcagctgccactactgccaccgggaaaacatttttcttaaaaaatgtgttcttatggccgggcgtggcggctcatgcctgttatctcagcactttgggaggccaaggcaagcggatcacgaagtcaggagnacaagaccatcctggctaaatggtgaaactcgtctttactaaaanacaaaaattgccaagnggttgcagcccatanttgactatcagaggt

SEQ ID NO: 219 - DNA, 652 bp, Homo sapiens
  misc_feature (591): n equals a,t,g, or c
  misc_feature (628): n equals a,t,g, or c
  misc_feature (651): n equals a,t,g, or c
ggacaataaggatgggcgtggtttagcctactttgtgtaaatgtgcagtaagtgctcatgccacttaggttgtgctagtgcaatttttcttagtttcatggatttgatccctgatcagaccaattacctgtgatccaaggctagcaatcttaaatacaaacaatactaagattggattatcgaaagcctttgcactacagtaagaacaacgcaaatagaactttctgattatagtccatcaatggcattgaccaccgaaaagtacttgcatgtcatctttgtattgccaaacaataccttgattttgaagtctgtaatctttgataatagttaaacacttttcttgggcatgaattgagacattcagttcattcactatacatgtgttttggtccagtctttggctttacttatgtctctgtggcgtcaggcaaatcaggtaacttcttacttacacccttgattgtaaaacagattatacttgtcttgcctactgaccyagkgtgggcmatttgggggraacatcttgggtgctggaattagggttctagggcttcagggcacttaaacatggatttaaaaacttggatncatttggaactaggaaggccaagttacaacctttcangacaactctgtattaagggttcna

SEQ ID NO: 220 - DNA, 531 bp, Homo sapiens
  misc_feature (436): n equals a,t,g, or c
aggaaggtgtactggcattggcccacattacagataaggaaaccagggctcagactggtgacctcattcctcaatgtcacaaaggtagtaagaggccaggaagggttagcagttcatctggcaaatgagtggctggctaagtaagccagagcccaaagtggcactgccctgaagccctccccttacctggagcctgaagccagaagccagtgggcctctggggcmagggctgaatgggggaggctggtccctgggactttggattgggaagcatcctgcagttacttgtagggccagggctcgttgctctgaaaagccctctgttttatatctcttgacacaagtaagatatagcaggatagctagaaacaaacaaatagagaaagaaggaactagaagacatccttgtgctctggtatccacatgtgtatctttntatataatctagaaatgtatgtatttcaaaggtttttcattctggaaaagtctgaaaccgacgacccttcttttgtaaaataaaggcctttgcgt

SEQ ID NO: 221 - DNA, 559 bp, Homo sapiens
atgggctaaagtggtaggtacgtgatgatgggcaggcaggcagcattaggcagctctctcagaagggagttttgtgcctcctaacccagattctgggtattgttatgtgtgtggggtgtgtctgtgtctacccacaggtgatgtttgaggcaccatcagagttaacacaaagaccccaagtagggtgctatatccatggattattcctggaaggtgcccgctgggatccagaggccttccagctggctgagtctcagcccaaggagctgtacacagagatggccgttatctggctcttgccaacacccaaccgcaaggcccaggaccaggacttttacctgtgccccatctacaagacactgactcgtgctggaacactatcaaccacaggacactctacmaactatgtcattgctgtggagatccccacccatcagccccagcgacactggataaagcgtggtgtggccctcatctgtgccctggactactagactcagacagaaggctggrgccattaaagctgaattttctaagcaaaaaaaaaaaaaaaaaaaaa

SEQ ID NO: 222 - DNA, 526 bp, Homo sapiens
  misc_feature (27): n equals a,t,g, or c
  misc_feature (46): n equals a,t,g, or c
  misc_feature (58): n equals a,t,g, or c
  misc_feature (66): n equals a,t,g, or c
  misc_feature (457): n equals a,t,g, or c
  misc_feature (488): n equals a,t,g, or c
  misc_feature (497): n equals a,t,g, or c
gcccaagaatgtacataaactccatancccaaggcattcgttgccnggcatcagaatncctagaanggtaaattagtaatgagaagatttctaatgagtatatcatcagatgaaagtaaaactgagaaatttgaagtccgatgagttttcccgaccacaaattagactgcatcactcctgttgactacatggctgtgtactgaatcagtggttctctcctggatggtgctgaagagcctggcacaccctgcttcctgggtatccctttcctttgttcacattgaccatcttccttcttatcagcagtctgtccccagacatatacaatacagttggctctgttctagtttataacttcattctagtcctgccttcttgagattatataccaggggtaaccttccattaaaaatttggggtgtgagagggtttaatcaaaaaataatttgggatttanccagcagggttcccagggggtaaccaaattncccccattnacaagttctggaggggcatcccacggtgg

SEQ ID NO: 223 - DNA, 355 bp, Homo sapiens
  misc_feature (200): n equals a,t,g, or c
  misc_feature (217): n equals a,t,g, or c
  misc_feature (304): n equals a,t,g, or c
caaagtatattaactagattagaagacaccatatactccaataaaatgaaatatattctattctcaatatataaactttaattgtactccctatcaaatattttggaaatttccatcacggcattactttgcatatttttttctaattaaatggttagtacagatggaaatctttataggatggactacttggaaaactnaagtgctacaaattttncaaaccattgatttaggaaatatatcctggaatccatatatttagtttacttttctatagtggatttgtatggggtttttgaaaggnttaatttaaatgtggagttggaaaaacttggtgaaattttggggattttac

SEQ ID NO: 224 - DNA, 364 bp, Homo sapiens
  misc_feature (338): n equals a,t,g, or c
  misc_feature (345): n equals a,t,g, or c
  misc_feature (359): n equals a,t,g, or c
agtatgggtgtctataaccccaaagttttttggttttgtcttttgattgtttgtttgtttgttctgttaagtacctaagtaatgtgtttttaggaaaagaaacctagcaagaacattgtagacaaggctaggcaaagatgatctatccttcaggtgatgtgtctgtcctcaagatcacttacaaagaagaggattggactggaagttactacttcrcaattttagttttgttttcacatctgttacttcaatcctgatgacaaattcctgaaaatgggatacaacctactactatgtatccctcytttcactagtgagggaattggagattttggganttggagnaaggtggaaagagnctttg

SEQ ID NO: 225 - DNA, 429 bp, Homo sapiens
ggcacagaaaaatattaatatctaatcatatatttcgtatgttaaaaattcttacttacctttttctttcccagagagagtttaggaattttctcaggtgtgttttctgtaggtgatttcaaacagaattccaaggctcagcttttagaatgctaccaaggaaaataatagggaaaatctccttcgattttggctgtagaaaatgaatacatttccacgaggaaatattgtagataattggtgagttacataaatttataaaacattagttcctctttctgcagggtaaatttctgagagtgaatatctctgttctgtatcctgttatcttgatttctgagtttcatactaaatttcatgagatgaaacttggtacctcctagaagtttttccctatgactaattgtttactacattatttttaataga

SEQ ID NO: 226 - DNA, 307 bp, Homo sapiens
  misc_feature (37): n equals a,t,g, or c
  misc_feature (97): n equals a,t,g, or c
  misc_feature (263): n equals a,t,g, or c
tttatgaaaaattgttatacttctaaaatgtaatganattcctaatcttgtattgcctttatatctaactgctggaccatatagtaaagtgatatgnataccggcacagtggctcatacttgtagtctcagcactttgggaggccaaggtgggaagattgcttgagacctggagttcaagaccagcctgatcaatatagtgagaccctgtcactacaaaaaatttaaaaaaaattagttgggcttggtgggcacgcacctgtnattcccagcttacttgggaggctaaggcaggaggattgcttggg

SEQ ID NO: 227 - DNA, 388 bp, Homo sapiens
  misc_feature (116): n equals a,t,g, or c
  misc_feature (119): n equals a,t,g, or c
  misc_feature (368): n equals a,t,g, or c
agcgcgcaggtgcgtcgccctctctccacgtccacggcgccgagtctcgccgcggtgggcaggcgccagggaaggttccccggctttggccgacggaggaagtcccggttacgcanagngcgactggggcagggctgaccttcccctttctctacttcactggcctcctccagacgtggtggttgcgccctttcggcctcgctttccgttttttggcttcatcccctagatctgcaaacagttcctcgtgtttcttccgttagccggggaaacgcggaactgcagcgtttgggaacccgggtttgcgcgtttggaaagcaaaaggggttaatctgctggagttcgacattgcaattaaagtttttatncccgggggttttaaaaaata

SEQ ID NO: 228 - DNA, 71 bp, Homo sapiens
gacagagcaagactccattaaaaaaaaaaatgcagtagactgctagttgtttccctgaaattggcacatat

SEQ ID NO: 229 - DNA, 630 bp, Homo sapiens
  misc_feature (4): n equals a,t,g, or c
  misc_feature (21): n equals a,t,g, or c
  misc_feature (611): n equals a,t,g, or c
  misc_feature (614): n equals a,t,g, or c
  misc_feature (627): n equals a,t,g, or c
ccangttggggccctgtgggnaggtgcctttccctaataaaaagtcctttcctaacccctcgcagccaatcccaccgtgcaccccataagggtgtcctgtccgtcccattcctagggcctcccatctggtgtgtgtttaccccattatccataagccattattgtgagtgcctcccagagcagataatcccttattatgactgaataatgtagcctacattatcccccattttacaaatgaggaaatgaggcacagagaggtgaagtaactcacccaaggtcacacagaccctcaagcttcaagctactccttcaccttcatatcagcactgtcttacagaaccttctgcaggatggaactgctctccatctgcaccatccgatgttgtcaccgctagacatgggtagttactgagtacttgaaaggtagctagtgcaactgaggaactgaatttttaattttgtttaattttaattaaatttaaatagccacatgtgggttgtgactcccatactgggcaaaacagccccctatatgctgtctctaaagaacaacaggctgggtacatggctcatacctatgatcccatgctttaggaggctgaggcagntgnttatgatcattantga

SEQ ID NO: 230 - DNA, 498 bp, Homo sapiens
tttttttttttttttttttttttttttttttttttttgtgtgaagcttcaatttaatagttttactgaaccatagaactcatttaaaaaccatagtatgggaaacagttcttatctctaaactcaaatgtaagaatgtattaatagaggcaagacatgggatgtcagtgagcacccattctttttctcctcagtaattcttgtatctttgaagacatctgcaattcaaacaaaaacctctgttaaactcaagaggaggactgcgagggaagctgtcatcaggggtcttccattaagacaagaaggtccaggaaggattcagagacgtattgttatgttagaagggactaaaagtatttgatccaggtttcttgtatagatgcgggatgacagcactgtagcctagaaagattttggtcactgtaaggatacaggaaaaaagcaactcagtttctcttactctcactctcatacggtcactcaacacttccaatactta

SEQ ID NO: 231 - DNA, 452 bp, Homo sapiens
  misc_feature (426): n equals a,t,g, or c
  misc_feature (429): n equals a,t,g, or c
ggcacgaggacacatgtaggatatagaggttttcagccacatactcaattgaaacaacttgagttgcacatcctttgttggtctgattgggaatgcaatttattgacactgttggtcaaagccatatctacagggacaggtagtcaggcaaatgagcaagacaagctgcatagaaaaataatcatcaggcccttttagtttgagttttgttgtacatatttggataaatgtacagatacagaaatagccacagaccataggaaagcaactgtctaagagaggtgccggatgacaactggtacacacagtctcaaggatggggattcagtagggagtggtggggactatggggagctggaatgagcatgtcactaacagagatagccactgttcccgctccagcccttgttgctatgtaggcatgtnggnccagtgttttgctatgagaattt

SEQ ID NO: 232 - DNA, 400 bp, Homo sapiens
  misc_feature (356): n equals a,t,g, or c
  misc_feature (396): n equals a,t,g, or c
ggcacaggggatgtttaggggaatccttggcttctacccacaagatgccagcattcaatgctgatagctgcccctcccccagttgtgacagtcaaaaatgtctccagacatggccaggtgtacctagaggccaaaattgtccctggttgagacccactgatgaatgtgtgcaatagtggttcccataaactgcatttaaaaaacagctgttaggtttcrtttggctcaagggctgtcatttttcactcctccccccatagagtatgtraaatgattaggaawtgacaacagacttttcatttagtattcaggttagtgtgtgtatatgccataagttatttccctaggcaattccntttagtatttttgttggcaataattcttttaaacgctacnttgt

SEQ ID NO: 233 - DNA, 295 bp, Homo sapiens
cacccggggaatccagggcctgtgctcagctgctgctgctctgccccctggcggcccctccgtgtccctgcgagggaggcagctggcaggcagccccgtgagccgggttgggtcccacgagtctcagttcagtgtcgtttctgacttttcttgactttctttcaggctaagtcctatcagccatggaaacaccattgctctcttcttccggtcactgttgccaaactataccatggagggggagaggcccgaggaaggagtggctgggggtctgaaccgcaaccagggcctgaaa

SEQ ID NO: 234 - DNA, 698 bp, Homo sapiens
cattttgtcacttggaagaaaatagtgtacctttgtatttatttaagagtgctcaaggcctaatagcaataaacaggtctagccaagaaattacaagctattctgttagctgggagtgctctctataagctgattaaggtactgataggaactctttgttattcatgttggttggggattagaaatttgtttttgtacatttatttcaaatgaggaggaggtcattttttctctcaaaaaatgagtatttattattgtcttactgatttctttgattatatacctctcctcctcagttcactcttgttttttttctttctctttggcttttgcttttgctctctctcacttctttcttattttgttgcattggtagagtgttgtatggctagcattgtattgtatgtaattaattttgcacaaaagcaaacatttagcatagtaggttaattttgtttgtttttatgaccatgccaaaataatattctgggctggtggagaacaaaggactgttctttaggactgaaacttgattttgctcataagtaagtaaaaaaaaacaaaaaacacacacactcacagatgttgtttccgtaagtgttataagcactggatataaatgggtattttttatcacttctggactaatgtgaaactgttgtaccgaaaactacatgaaccaaagtcatctgtttcga

SEQ ID NO: 235 - DNA, 314 bp, Homo sapiens
ggcacgaggttttgttttgttttttgttttcagagcctaacctgcctggaggaaggaaattacccacctctggccatcctgtcccatgtaagggtggtgatgggwgggagggctgagaagctcttgtgaaggtcacagcccagaggcacaggctccctaaaggactcagacctaatcacaggactacagaacctttccccttcccacacatgttacttatagtactgcaggcctctttacagcagttacagttacttttacctggtacatcacatctggttatcaagaaaaaawttcagctggacctataatcc

SEQ ID NO: 236 - DNA, 519 bp, Homo sapiens
attaagcttacttatggttgaaaactggcacacacaaaacgaacatcatctagcagtgcccagcgaaggtagaaacccacgcatctcattagaaaaatctgcttttaatattttggtttcaagaaatgatgcatgacttctcaaatccttcctgcaattaatccctccatgttcctgtgtttagaaaatgattcattacctttgaaccttccttcctttgccttcggttgtccttggggagccattagcacacactgtggcgagctagggttacctaaccgccagcatcacggctatttgttttcacaggtgcagtatgcagaattgaaactctgcagcagccacagccccctgcggaagaagcgcasytctctaggggcacacaccgactttggacagcagcacccaatattgtgtttggttgagtagaccaatgttatggctgtttcagtggtacccaaggtgtccttytgaaatgcatgccctgtggcaccctctgtatacttcctcctccttcac

SEQ ID NO: 237 - DNA, 406 bp, Homo sapiens
ggcacgagaaaacacatgttatgttttggaaggtttatgggtcacttatggaacttgagagtattacacgaatgggaaatttagtggcaaaactcaaacctcgtttaaatccagctcattgcctatcttctttatgtttgtacctgggcagctcattgtaactggagaaaaacatggctatatgactggtgtcactttaaatttatcatcgtcacccgttgcaagtgatctctctatgctgcctaacaatcccagtgtcttcacttatctctttgaggagtcaataataggctctttttttttttaatcygttttttcttcctgcatagccttgatttgccgagaccagctcgtttggggagaccctaacctagcggsgctagaggaattaaagacacacacagaa

SEQ ID NO: 238 - DNA, 390 bp, Homo sapiens
ggcacgaggctatccacccacctcagcctcccaaagtgctaggattacagatgtgagccaccacacccaggctgactgtattttcaaatattctgtcttctacgttactcatttttttcttctgcttgatcagttttgctgttgagaccctctaatgcatttttcagtttgtccattgtagttttcaactctagtatttccgtttgatttttgaaaataaaaatacmaaaaattagcaggtgtggtggtgcacactgtaatcccagctamtcgggargctgaggctggagamtcgctttgggcccaggagacagaaggttcagtgggtcgagawtgtgctamtgcamtccaacctgggcgamagagcmagamtgtctccaaaaaaaaaaa

SEQ ID NO: 239 - DNA, 428 bp, Homo sapiens
  misc_feature (424): n equals a,t,g, or c
ggcacgagccccactgcagaggtactgcttgtgctgccctaatgaatacactcttccttgcctcctgaatttgctcttttacctaaacggaaacaaatactgaaaatataagacgtgttattgcaaaaagaaggagtaaagacagagtctgtgactttcccacacatcagtggaagctggtgtttttttgaatagaagtcatctctgtatggctggctgtcagacagaacctcccacacagaagggacccacactgggtttctttctcctgtcttaccatcctgggattcttactgattatctttaaacttacagtttatgactgaagtctgatgggacactggagcatgggcttgagcagatgaaatatgtggaagcaaggaaggagctttgtagtttagtacttaatagcacttccccctgntttg

SEQ ID NO: 240 - DNA, 343 bp, Homo sapiens
aaacaccatgcagaagctgtatgattttggacccccttacmkcaatctccttatctgtgaaatgggaataataaaatctacctcacagaattattaacagaattaaatgagataatccatggaaagctagtagcagcatgactaacacagaagtaagcactgaataatgtacacatgttgatgacagttgatttttatatgcgttcttatgtcatagacatttgttgttattaaaaatatcacaggggagcgtggccctgctgtaaaaaaaacattacaagatatcatggtggtggagaatgattccattgtggtgacttccatcacagctctcagctgtgaa

SEQ ID NO: 241 - DNA, 406 bp, Homo sapiens
  misc_feature (369): n equals a,t,g, or c
  misc_feature (379): n equals a,t,g, or c
  misc_feature (399): n equals a,t,g, or c
ggcacagataaaattgaaggaaataatccgtgtcctgttctaacccagaatgaggatgaatgttctgttgaattagcttgtctcttggctccttgttttgctaacatcatgaccagttcctgttattgctatatgtctgtatctttcagccacaagtatatggttatgatgacttgcagatgcttcagacaagatttccattggattactacagcatcccatttcccacacccactactccgctgactgggagggatggtagcctggccagcaacccttattctggtgaccctcacaaaagttycggccgtgggggatgcctcctccccagmcccgggccacaaacctttgggcccaacccccaaccangaacccaggncgcagactcaccattaccanggcagga

SEQ ID NO: 242 - DNA, 566 bp, Homo sapiens
  misc_feature (397): n equals a,t,g, or c
  misc_feature (521): n equals a,t,g, or c
  misc_feature (532): n equals a,t,g, or c
  misc_feature (540): n equals a,t,g, or c
ggcacagcaggggagaaaaaagagactccatgttttcaaagtttttgctttttattatttatttatttatttttgctttttaaaagcctctcaacaaactctccttattcccatgtgactgaggatgaaacattctcagattaaacagacttctcaaggtcacgcattgtcagtgccaacattcaaaagaaggctaggtcaggttcttgaacatccttgtgaaattattcttcccttaagtctgggttaaattataaattatgatctgcatttaaattcccaaatttaaaacaaaccaaacaaaacaacgcacttcagactcttttggaaacctttgaaaggaacttgatttctgtgtgctttgaaagtatatattgcaatcaaggtattggtggtnaagttgtgtttttgaggttttgtcacaaatttaacaaaatttatatggccggaagagttttggcagagaaatgcaaatcattgtaagcgcctgtcataataagtagtgtggcttggttcccgtntatgtatcccnaaaacacntaatacaccattacattgacacgagg

SEQ ID NO: 243 - DNA, 417 bp, Homo sapiens
  misc_feature (3): n equals a,t,g, or c
  misc_feature (388): n equals a,t,g, or c
atnaaatgatctaatgatactaagttttggtgatgatgtcagctcttacattgaaaacaatcactgtggaaaaatttgtccctcagtaaatttaaagataaacatgctcaaaacctagcaattgcactctgaagtatacatctttgcaggttatctttcattacagttatttttttccctgtcaggaccctaactaatacaatgccttgggaaaactaatgaacatgtatcctaggaagcatgtacaagaaagttcttcccagtcaggaaggtggccaagaaaaaaattttttaatgttcatagcagcactgcaatatccaaaagttagaaatgaaccaaatattcagcaatggtagaatggttaaattgtaccatggcattttatanttgaaacagtagaattctacaccagtggt

SEQ ID NO: 244 - DNA, 438 bp, Homo sapiens
  misc_feature (48): n equals a,t,g, or c
  misc_feature (426): n equals a,t,g, or c
  misc_feature (436): n equals a,t,g, or c
  misc_feature (438): n equals a,t,g, or c
ttctgttttggaaataatataaatatatctttattttagactttttgntgtaaagtttcttaaatatttacaactttaggataatcagtgtacatttcaatatataatgtcctaaaaatcaaacagctaccaaacattgaattgaagttctgacttatataaatcatttgcataaaaactgatcattaaaaacagtatctaatgaacattttggccccaatattaattaaaactgaaatgatagcattacaagctaaagattaatttcaatgacatgtcattcaaccattttgacataattgacttataataatctaaaattgactatttttatgacatatttgacctaaatgaagagaaaaaagctttgactcattcttaattactctttctaaccaattgatggccaataactgaaattaattncaaccatttntn

SEQ ID NO: 245 - DNA, 466 bp, Homo sapiens
  misc_feature (18): n equals a,t,g, or c
  misc_feature (453): n equals a,t,g, or c
  misc_feature (463): n equals a,t,g, or c
  misc_feature (464): n equals a,t,g, or c
gggaattagacagcaganagaagaaaagggagctcagggcaggagggataggctgagcaaaagcacggaggtgtgagcaaggctgggaggtgtaggcasggacagggtgagagctaaggcacttggatggtatcttgcaggagatggggagctagtgcatgtatttagatggggagtggagctgtcaggtttatattttagagcactggcctgagcagcagtgcgcatggattagaggggaccagacctttgtaagaagagcagtcaagatgtgtatcagttaagaaagcctttagactgtaagtaagcagcaaatcccaaccccaaaaaggctttaaagagtgaggcattttagtttccttatgtgttacaaagttccagtaccaggactgctctagggttgggagaatttcaggggctcccatgacatccacaagcacccagttcttttcncccgtcatcnnct

SEQ ID NO: 246 - DNA, 292 bp, Homo sapiens
  misc_feature (242): n equals a,t,g, or c
ggcacaggggaaaataggtttacagtagctacaagattccattttaggttttcttatgtcaataaatgtcaatattttacacttccagcaaaagtacccgttaaagctaaatctaaatattattcctcatagcacagtttctggtctccttaaattaaggrtcctactcatcaggrttgrataaaaagggggraattcctaaaattggtatattgtataatattgtgggttaagtaaaattnaggggggcattatggaaatgtacctattttaaagggcagtggcaattacc

SEQ ID NO: 247 - DNA, 88 bp, Homo sapiens
aattcggcacgaggagattgagaccatcctggctaacacggtgaggccccgtctgtactaaaaatacaaaaaaaaaaaaaaaaaaaaa

SEQ ID NO: 248 - DNA, 349 bp, Homo sapiens
  misc_feature (109): n equals a,t,g, or c
  misc_feature (248): n equals a,t,g, or c
  misc_feature (300): n equals a,t,g, or c
attcggcacgagcgtgagtctgctcatcttcttcagtttgcgtttcatttttggtagattctgtttccacgtcttcaagcccactgatcttttaagctgctgttaactnatggccattttctgtatgagccattgtgttttttcatctctataaatttggttttggtatttaaaaaaatgtcttccagctaggctggcggctcacacctgtgatcccaacgctttgggaggttgaggcagggggattncttgagcccaggagtttgagactagcctggggcaatacagtggggacctcancttttaaaaaattaattaaaaaaggtccaggtgccggttggctcacggc

SEQ ID NO: 249 - DNA, 439 bp, Homo sapiens
  misc_feature (35): n equals a,t,g, or c
  misc_feature (36): n equals a,t,g, or c
  misc_feature (38): n equals a,t,g, or c
atttatgctttcatagaatttagattctaatggcnngnggtgtgggtggcagattagtgagttaaatatgctacgggttagtgataaatgctagggtgtaagagtgtgtgtgcacacatgtgcatgcacgcacatatgtggaggctgaagacaatgcttgctcctgccccatccccaccacagacctcgtagcaactggttcccaaactttatttatcataaaagtcattgaccttgaatcacaatgggctgggtccctgcactacacaacatytgaatgtgratgtgrgtcttagrttatagataattttccatacttaaaaagttatgagcatatgggaaaaagcagtaacagtatacacaatttcatttctcagatggtacatctcttctcatgagtttttcgtcctgaaaatacagagaggatattagtactatc

SEQ ID NO: 250 - DNA, 328 bp, Homo sapiens
  misc_feature (299): n equals a,t,g, or c
acattcaaggtggtcacctgccctagtagttggagctcagtagctgaatttctgaaaccaaatctgtgtcttcataaaataaggtgcaaaaaaaaaaaaataccagttaagtaaagcctcaactgggtttttgtttctatgaaaatatcattataatcactatttatttcctaagttgaacctgaatagaaagggaaaccattcttattaagctttttattaggccctgtggctaaatgtgtacatttatattaggaatgtactgtacagtccagatcttttctttaattcttattggnttttttttttttttttttttttaggagat

SEQ ID NO: 251 - DNA, 406 bp, Homo sapiens
  misc_feature (368): n equals a,t,g, or c
  misc_feature (386): n equals a,t,g, or c
  misc_feature (395): n equals a,t,g, or c
  misc_feature (405): n equals a,t,g, or c
gggacgagaaggatatttagccttagattttgagagggatctatctgcttttgattcctggtgtttcaggaggaaaaccgagttatatcccaaagcaggatcgtagtgcctcctctgtttttcccaaggagtcccaggctgttagaagttaccttaggtcctctcatgtgtgcaacaaaagtggcaagaagacaaaatggagaaaaacaattcagttggctaaaaagaaaaaaataattaaaaaaaaacaaagatccaagaagagaaaaaaccaaaaggccctttaaatatacctatagcttggatatccacttttaattaagctgacttttaactatrgcgcwctttctaaaaaaaaaaaaaaaaancccgagggggggccggtnccaattcgncccaaagggng

SEQ ID NO: 252 - DNA, 452 bp, Homo sapiens
  misc_feature (3): n equals a,t,g, or c
  misc_feature (422): n equals a,t,g, or c
ggncacgagaaaccccaattgtactaaaaatacaaaattagccgggcgtggtggcaggtgcctgtaatcccagctacttgggaggctgaggcaggagagtgcttgaacccaggaggcggaggttgtggtgagccaagatcatgccactgcactccagcctgggcaacaagaacaaaactccatctaaagaagaaaaagaaaaactgaagakagagtagttgtcagagtgaagagtttaatcaacagaagtagagtaacatattctttagtagaactcacattatctgcttgaagcacattttgctaatgttttattcagaatgtatcatagatataatgttttaactaataaaatagaatggtttttctctatgaatgaatcacattcttctgccaacatagtttatcctgtctcagtaggntactccataacacatagcagtacaccacta

SEQ ID NO: 253 - DNA, 172 bp, Homo sapiens
gattgtatcttggagtgatgagattataagtgatttttaattttcttcactatgctttactgcaattaaacatttacaattcaattttatttaacaaaaatatataaaacttctcaaatggagtaacttcagtaccagacatcctcaacctgactgctctggaggttattgt

SEQ ID NO: 254 - DNA, 457 bp, Homo sapiens
  misc_feature (13): n equals a,t,g, or c
  misc_feature (26): n equals a,t,g, or c
  misc_feature (92): n equals a,t,g, or c
  misc_feature (97): n equals a,t,g, or c
cctgggcagttangaaaaagtttttncccccagaggttggaaagtatggaagagtttgaagactctttttttcctacccctgcacctccccnggaantccccccctcccctgcctgtaaaaatttattgtcccaatgagaatagtataattgttttccaacaaagtctctttgagcccagtgaaacacgatgggtttttttgtttgccctgatcacttgctcccaaccagcagcattaaatgttttcccatttggataaacttgcatcgtcagcttcctaaaaccctggaggtttcccgtgggctcgttcaagaactttccagctgttgtttaaaagactttagagctagcttgttcagcctgtggcctgcaggctgcacgcggccccggactgctttgaatgtgctccaacacgagttcgtaaactttcttaaaatacaaaaaaaaaaaaaaaaaa

SEQ ID NO: 255 - DNA, 388 bp, Homo sapiens
  misc_feature (58): n equals a,t,g, or c
  misc_feature (388): n equals a,t,g, or c
ttggggggcccacctccttccttttccctttcccgtttcctatcctctgtcctgtccnccgtcctctgtcctcctcctctttcctcaccttgttgcccaatgtccttgttgcctgagaaggaacactcctattccagatgcccatccaggaaagaaaggcccagatggatggagggtcccactgtgtatatttgtacagaatcatttataaagttttctacacttctaaaaaaagtatttctaacttgggctgttggacagtttgtgtgcctctgagccggcaagcctgttgtttcttgtgtttagtgcaatgtttagtgagaaaccaatgtctgaattatttatgccaataaaaaatttgagaattaaaaaaaaaaaaaaaaaaatn

SEQ ID NO: 256 - DNA, 652 bp, Homo sapiens
ccgctgtawawgawawagcyttgttaaatatgaaggtcctttaaatacaattgatgtttagtactatatatgtacttttcacattctttggatttctggaaggttatgacactttactgtttacagctaatgcatagttacttgcatgccatggttgtacagtagcagactatgaccctattgtgatattaagtgtttatttcataatgccatttatacatagctgaatttgatgaggattgaatgtcatatataagaggaatgatcatacaatatgtagttgcatcttatrtaagatttctaggttgcatctaaccatgactatgtcattattttgataattaggcatttatgaattatagtatatattcctcatgttggcatgataattttgctattttccatgcattaaaaataagacaaattcttagagtaattttagtaattttatctataatctgtggggtttttttggagggggaggccactggttgtttctacttccctgtgatattttctctctcattaaaggaatgagctaagtttgtaaatatctcctaaaaacaatcaagtaattttattagcttcttttggaccctctaaatattgacttctctcatgaaaaaataaattgatgaaactaaaaaaaaaa

SEQ ID NO: 257 - DNA, 807 bp, Homo sapiens
  misc_feature (796): n equals a,t,g, or c
ctcctctccaggcccattcgtcaaagaatttataacagcttcagtggattttacctgcttttctactttctataaatggaatcacagggtattgtggtagatggaccacagatttcttccattcctgtatgcatgaccctttgcaatgtgacttctactcagggagaggtagggtctattttcacacccttgaatctaggctggccttttgacttatggggtgaccaatagaatgcagagaaatggacacgatgaagctcctgaggctgggccttgcaactcttgatagttacaacccttagttttaaaactttgcagcttctactttcactctcttgaaatgctgcccccagactgccgtgtaaggaaggtggtctaggccacctgggaaagaactgagcatcaccagaatgaggtcacgtgagggtacctcagaccttcccacccagccaaatctgcatctgagtgcagccttatgactcaactaaggtgaaatcagaagagaaattgcacagctatcccatcttctcatgagaagtaatctatctgttgttttaagacattaagttttgggatctatacttgttatgcagcgaaacaagtatagattagtgaaacaagtatgtactcttattttggtcaggcttctgttgctcaacacgtttgtaagattgttccakattgctgcatgtagttgaataccmttcgctctcattgctgtatcctattccattgtatgaaaatattgtaatttatccatttaattactgatggacattgggggtagttctagttnggaccctacaa

SEQ ID NO: 258 - DNA, 464 bp, Homo sapiens
ggcacgagaaacagggcaagtacccagaagtccacattcccctcgagaatctacagcagtttcctgccttcaattcttatacctgctcctctgattctgctttgggtcccaccagcaccgagggccatggggctctccatttctcctctcagcagaagtccaggttcccatgcagatgctgagggttggaaaagcaaaagcagatgtgtggcccaaaactgctccaaagaaagatgagaacagcttagttcctcctgcccctgtggacagcgacggggagagtgataattcagaccgtgttcctgtgcccagttttcaaaattccttcagccaagctattgaagcagccttcatgaaactggacacaccagctacttcagatcccctctctgaagagaaaggaggaaagaaaagaaaaaaacagaaacagaagctcctgttcagcacctcagtcgtccacacca

SEQ ID NO: 259 - DNA, 443 bp, Homo sapiens
ggcacagcttctctgcctgcatgtctcaggtcgccctctggccaattctgaagtcctgccctgcctcaaggagcagaggtggcaraggtgggcccaccgcaacagggtaaatgtcccggtgtgcacataacctccagattgcagggcacctgcgtatgctaactgctgctgtggaaaccagctctctctggctctggccttggggagagggagccacagtggatttaggaagagtctccagatgtagcttgagactaccaaacaggcctgacccccacagaccctgcctcttatgagcgcccagactgagccctgcttcaggctcccagccatgtggccagctgcttttcttctttaatttttagcatcagacgaatatttcaggaaaatattctcattgtaaaatctcaaacattaataaaatgtagtgaataaaaaaaaaa

SEQ ID NO: 260 - DNA, 450 bp, Homo sapiens
  misc_feature (399): n equals a,t,g, or c
  misc_feature (400): n equals a,t,g, or c
ggcacgagctggcattacaggtgtgacccacctcacccagccagagtctggtttaaagagagtttattcaagcatagagtttaaggacagcctcctgggaaacacagattccaaaggatggaagtcagtgttttgtgaatgtgaagtttggattgtttatatagacagattggggaagcttaacagaatttcaacatctgtctctccagggtcttattttttgtgtaggctgtagtccatggtacaatcatagctcactgcagcttctaactgccgggctcaagggatcttcctacctcagcctcctgagtrtstgggattacaggtgccaaccactacrtccagctctatataaggcttaatgcatagttacaacaatctgattagtcaggtggtctnnctctttcaggaaaggtgtattaatactaccacactgaagatgtagcagtc

SEQ ID NO: 261 - DNA, 475 bp, Homo sapiens
cgcagcctgcgctagtggccagatcccagacatccgagtagatcccgtgaaaagcttctacttggtttcttcgtacattctggatccaccctttcatgcatattccagaccacatttccactggagcagttgaaatgagagagatgggaatgggactcacccgaaccagaggaatttttattacagacccattaacagaggtgtcaaagtcacaggaacaaggatgtgcacctcagaaacacagagctcagtggaaaatcagtttgcttctatttgtttaaaaaatgggggacttatgcataaatctaagaccttcttgaatctaacattctaagacctgtatgccacagaaaggagggtctcagaacgccggaggatagtatttaaatcttaaatatctatattgttctccacagttactgggtcaccacatagcaggcattcaataaaaacgtgtttgtttactaaaaaaaaa

SEQ ID NO: 262 - DNA, 148 bp, Homo sapiens
gggagcacataaacttgacaaagccattttccacatttgagaactctcggcttatttgtttaatggcaaatgagttttaaaaggaaataaactccttgagctgtcttttccagtaaaaaaaaaaaaaaaaaaaaaaaaaaaaaaaaaa

SEQ ID NO: 263 - DNA, 444 bp, Homo sapiens
  misc_feature (15): n equals a,t,g, or c
  misc_feature (42): n equals a,t,g, or c
actcaagttgacttncctcagatttgccctagtgaaaactgnaagggctggattagaccccaragagcagggtggacagagccccatgctggaagtactgagcatcaggactgtatggggctggctttagcatcatcattctgtgcaaagacaaataaataattaatgtcacactgtctgaaattttcaccaaaaccaaaaaggcgcattaacatgattgttccaacctcatggtttttcaagtgtgagcgcccagagacctcttcagaggctaagagagcatgcgctgccacagctgttagcatttggagacgtaattacaatgcccccactccccgcaccaaacctgggtttttctacygtttttgtagatgtcatgatgtcacgacccctgcaccctgaaaaaaataaatgtttttaaggacaaaaaaaaaaaaaaaaaat

SEQ ID NO: 264 - DNA, 493 bp, Homo sapiens
  misc_feature (13): n equals a,t,g, or c
  misc_feature (18): n equals a,t,g, or c
  misc_feature (43): n equals a,t,g, or c
  misc_feature (315): n equals a,t,g, or c
gaagggaacaaanaaaangccctaaaaaaaacctccccggaanctgggttcccccaaccttaaaaacggggtccctcctaccactawaaccagcactatgagarttttggggaattcacctggcgatgtgaggatgagttaggtcccaggcttccarcgtgttgggacagtcagaggagttgtagatgattggaggaaaggaagaagacggcagccagggtatttccccttctccctgcctcagatggcatctccagcatctccttcatgacctctgtctcctccgtgtgaccttccatcccctcaaagcaggantgcgccctgatgttgctaatctgataggttgctcctatttgtccttctataatcccaaagtcttcctaattggtttctcatcttgaacttcctctgtggaattacctaaaatgtattttgctttcctgactaggtcttgattaatatatacttcaaactaaaagttagtaaaaaaaaa

SEQ ID NO: 265 - DNA, 418 bp, Homo sapiens
ggcacagttgaaacaatgtgtcagagcaaataatgccatgccttgggtagaataaaggtattgctgttcatctcaatgcctacagccagtgtttcttagccatgtgatttccgacgagttattttacctctctgaccctcagtttccatctctctccacagggacttcatgggaattacattaaatgatacttgtaaggagttgggctgtgggagaaacacaacagctagtggctgtaattttgttgttgtgtgtgtcagtaagatgatggatgcagacatgtcacacagttcctgatacacacaggcctctgtaacattggctgtggcttggacygatacgtrgccataggwgtgcagttggagaagagaggcatgtattagtccattctcacacgactataaagaactacttgaga

SEQ ID NO: 266 - DNA, 583 bp, Homo sapiens
  misc_feature (549): n equals a,t,g, or c
  misc_feature (580): n equals a,t,g, or c
ggcagagccaatgtatatctgcttaagccatcagcaaaaaactaataggcttactacaatttctttggaaaaacctgcttctggcttcagctcacttcctttgttctacatccgaagatgcacgtgagggcagctgcctggtaactggaggcttcacttgaccagcactgagcttctgttcactcmttcaggtctcacatccatgtcatctccaggactcaccgaaaatagtcagagggatccctctgaactagatgcagagacgcccagaaggtcctggaaatggagcacacccagcaaatgaagctgaaggagcggcagaagttttttgaggaagccttccagcaggacatggagcagtacctgtccactggctacctgcagattgcagagcggcgagagcccataggcagcatgtcatccatggaagtgaacgtggacatgctggagcagatggacctgatggacatatcggaccaggaggccctggacgtcttcctgaactctggaggagaagagaacactgtgctgtcccccgccttaggtaanggttgacaaactttgcattagctgaaccagngca

SEQ ID NO: 267 - DNA, 576 bp, Homo sapiens
tagccatcgtggttgaaggatttgaattgggaaagttcctttgggtttttccaaaaggtgctgttaccttgtatagatatccacctatctattcacatgggaccagcaaacgggacttctctctctatcgatataaatgtctagaatgaacactgggatgcataaaataaactgatctgttcagacaactattttcaaatagtttttttttggcatctttcttagaagaactgttttgttaatgctaagaggtaaatgctgcttattataacctataatcacagctctgctttgtagaaaaatcaactttctgcaactcatagatcttgctgaaacactgttcttgtgattttagtacaacttttactttcttttataaagtataaaatctcacactgaagacaacagtagcccttgtgtttgctagtatggggattgtccactaagggacagctaaaagaactgaaatagttaatgcttgggagatctgagagtgggcaactgtgggatgtgattcttttaagggtaaaatcaacagggcacttactttatgktcaaaaggaaaattaggggctt

SEQ ID NO: 268 - DNA, 589 bp, Homo sapiens
  misc_feature (1): n equals a,t,g, or c
  misc_feature (41): n equals a,t,g, or c
  misc_feature (583): n equals a,t,g, or c
ngattttaggtgacatatagaaggtacgcctgcagtaccgntccggaattcccgggtcgacccacgcgtccgcccacggtccggtggccacaggttgagggctgcagtgtccagtggaatggggcaattgcgggcctgggggcycttggcctgtccgtggcgggagcatctgcaaggaggagccccagagtccagggagcactgtggggagctccttagagctgaactcacccggcgtcaactcatcaaccctccacccatggacaggggtgcccccagcacaggagaggactcagccctctgcccccacgcacggtgggtgcctgtcaccctgtcctgcccagcggcccgagggcagcagtgggtgtgagggcagcccccggcctcccaagagcagctgagaggatccctgcgggaatccgggcttygggtgcatgcgatctgatctgagttgtttctgacagtgacagagtgacaatctataagtatctcaagatcaaatggttaaataaaacataagaaatttaaaacgattaaaaaaaaaaaaaggggggcccttttaggggttcttggggggcccaanttaggg

SEQ ID NO: 269 - DNA, 665 bp, Homo sapiens
taccctgcataatcaacaagaatgtgagctattccaataataaaatgcttttcacaatcaatttaaaaattgcccattttggcctttctggcagcccacagaatccaccctccgttgtcctcttgtttagagagctggctagctcattcctcaggaatgacccatgtcccaggagctcaggaatcacacatcccctagaggttattctgaagtccatgtggtgctctagtggcagcaacttctccatttgccctctgtgttcctgccattaggccataacccggtctggtcaaagacttgccattttgtttggacaaagttgcaatttaaatgtttggatccagagcttgcagtaggaatgttccagaaatacttagtttagctttttgaatgcaaaggttgaatgcacttggaaaggcctagaatagaaattaagcaagagcacttctttcttaacaagtgatctgttcataactatggatggcagtagagcaagaggacgcaaactggtgaacaaagtcacaaatgccttagaaactaggtgacatttgagccagatgtgaaagagtgtgacttgagaggaattcgcatagaggagaagatctagcataaatagacagcctagataaatcagtttgatcatatagtctctgcatacaagtctt

SEQ ID NO: 270 - DNA, 426 bp, Homo sapiens
accctcactaaagggaacaaaagctggagctccaccgcggtggcggccgctctagaactagtggatcccccgggctgcaggaattcggcacgaggcggccctcgcaggcctcgggccgggcacggggactaggatgccgccggggacggggatgaggccgtgaggatgcgcgaagggccgccccctctcccggcccgcggggggcgctcggcgctgtgcccgggctagcccgaggcccggcctcaggccccacgcggcccctttccccctcggacccaccgtgcgtcccgcggcacggaccctctgcccgggaggcgcgggcacatcgcggagctccggcgcggcggcgggggagccgcagcagcaggtgcgcggcctgggccggagccgcagcccgggaggaggcggtgctaatcagggaccgga

SEQ ID NO: 271 - DNA, 539 bp, Homo sapiens
  misc_feature (505): n equals a,t,g, or c
cagggcaccactctgactttcctcgacagccactgtgaggtgaacagggactggctccagcctctgttgcacagggtcaaagaggactacacgcgggtggtgtgccctgtgatcgatatcattaacctggacaccttcacctacatcgagtctgcctcggagctcagaggggggtttgactkgagcctccacttccagtkggagcagctctycccagagcagaaggctcggcgcctggaccccacggagcccatcaggactcctatcatagctggagggctcttcgtgatcgacaaagcttggtttgattacctggggaaatatgatatggacatggacatctggggtggggagaactttgaaatctccttccgagtgtggatgtgcgggggcagcctagagatcgtcccctgcarccgartggggcacgtyttycggaagaagcacccctacgttttccctgatggaaatgcaacaccgtatataaagaacaccaagcggacanctgaagtgtggatggatgaatacaagcaatacta

SEQ ID NO: 272 - DNA, 415 bp, Homo sapiens
ggcacgagctcgtgcgtgccgggtacacgcggggcctcatctcatcctgcactcatggcagagcaggcctttcctccttgaacatgtagacaagtctcagagaggtcagtgcgccggcccgatgtctcccagtgagtggagaggccacgccacagtccgggccaggtctgacccagcactggcacccctgagcctatggatcatccgaggactgtaatcctcaacccgttcctcagagcaacttggtgaaagggagtgtctgtctkctgtcagaagcagtggtggagatggcggctcctgtgctgaggtagagtcccaggggatgcgcacgttgtgaatgggagagttcacatcckygaytggcgagaggagacayttggaagacaagcaaccggaagcgaaacagagaytgttt

SEQ ID NO: 273 - DNA, 1189 bp, Homo sapiens
tgggaggggcacagacattgtgcaggttgcacacaaaaacagaactagggtctctggcagcggaaatgagtcatacagagagccgtttagaggtttctcaatacagttcttgggcttattaaggttgagtaatggcaattagtgtggaggcaaattggaacaacagtgacagtgttgattatgaagcaaatgaaraagctcaaaaggaargcattttcttggagtgcctcaaagaattctgccctttaattatctgccctctcagtgtagagagagtgagatatcactggaaaacactggagggccatttgtggtgacacagaagcctctcatacagacaggaagcaaatgaatggcaggggatgtgagtttggatggaaaggctgtcatggggattcagatkggattctagagtcaggtgcattgtggtccttgcctgatgcaggaggtttggactcagatttttctgaagacaacataagcagagaaacaaggtgtgaagacaagcttgtttgaggatgttggcaccatgacaaagttatttactgtaccccatcccagtgcccagatgaacaatatgaacatgatagggatgcagttcacatgtgttccattttagagtttgctttaaaaatttatatccatgtcataaccttctgattaggatttgagagaactgattgtcaaagtgaactatatttttaggaaagtgttattttatattattctgatgctataaaagccaagattgctaaactgaaggactctgtaacgtgagaagcatatcatattctaagtatccctaaggtgtctctcttgacctcagcactaacagctggtaatggcagggattgctgttatttcacatgtgacccacgatggtgagacatactcacccacccagggcgarggggaagargggagattgccacatatttccagctggcatagcaattgtagtattaagaaggtgaaagattcatatctaatcaaataacctcagataagtgtgtcctgggctgttgtccctgtggctttaacaagtcacttggtgatgcacaaactgaatgcagctgaactctgcccagggctgtgatgactgcttttcatagctttgaattctattaaaaaccagaatgaaaatgaaaaaaaaaaaaaaaaaaaaactcgagggggggcccgtaccccc

SEQ ID NO: 274 - DNA, 419 bp, Homo sapiens
  misc_feature (410): n equals a,t,g, or c
ggcacgagggaagattttgcctgaagcgggaaagccaagggctgggcggcgcgagacccccattcctagcgactggggctggctggtggcccgcggcagcccccgcgccgggaggattaggcctcccgccgctcccacccgtccggaccctcccacgtgtttaggtcctcccaaaagtattcggcctccggcccctgccccttcccccggctggcctggacctcggggacgtggggggaacccgtgggagcagggggattctggacggggagggatagcggttggggagaaggctgarcggggaaaggagaraaggggttccggggacggcarggargagagtgggtcgtgccggagacccaaggagagacacaattgggcaaagattaaggggtgtaagggttgggaanttccaaact

SEQ ID NO: 275 - DNA, 437 bp, Homo sapiens
gagagcccgcgggcgtgggggagctcggggacctgcggaccgggggagcccgaacgaggggatcccgcggcggcgccagcgaggcggaggagcaggcggtggaggcgaggcaggaagaggagcaggacttggatggtgagaaggggccatcatcggaagggcctgaggaggaggacggagaaggcttctccttcaaatacagccccgggaagctgaggggaaaccagtacaagaagatgatgaccaaagaggagctggaggaggagcagaggattgagctgacctctgacctcacttccctgtagcaattccttaggtcctgagccacaaatattcttgcaaatccttttgaactgaagawtaacgartatccttagcgtcctcctaaagyttttccttttggcatcttaaaagcttgagagataaaacggaaaccc

SEQ ID NO: 276 - DNA, 392 bp, Homo sapiens
  misc_feature (326): n equals a,t,g, or c
  misc_feature (386): n equals a,t,g, or c
cggagcgcgcaattaaccckcacataaagggaacaaaagctgggtacgggccccccctcgagttttttttttttttttttaratggagtctcaaaaaaataaaagagaccttaagaaggaaatccctgcatgaaggtattttgcatgaaaccagtctctttttatagcacgtttgccaaagtgcctaaatgtgacttggaaacgaakgrttcatgagaagatccatggtccatttccctagtctttggaaactctggactttagtccgttaaaggagaagtaaaaaatgcagtgatttgtgtttaagattccttctacgcgtcagnacttgtggttcaaggcacttttggacttgcacagttcacagaatggacaggaatttcagnacctgg

SEQ ID NO: 277 - DNA, 509 bp, Homo sapiens
tgagaccctgtcccgaaaaaaaaaaaagttggcctcctgccttagactcctgagtagctgggactrcaggcgtgtgccaccctgccctgcttctaataacctcttaaagattcctcctcttaacactatcacaatggcaattaaatttccccatagttttggagggaacattcaaatagtaacatctagctagaacagcctrtctgttggcagaatgaagtagaacagtttagtgggaacaaggatacaagtgtatttttcatggaccaaatacagactctggaaaggatacggttgtggatcatcgggaaaagaacttcacgaaagagatagatgcacagatggatagtgaaggtcaccctggtgaaagccaaggactgaatgcaggtcttaaatggccagttgtggaaagaatcatccttataaaagaattgagataggagatctctaatagaggaggagttctctaatagaggaggagttctttgtgaaacccacagaaatccccc

SEQ ID NO: 278 - DNA, 394 bp, Homo sapiens
  misc_feature (41): n equals a,t,g, or c
caagctggggacccaacatcccgaatctaattccgcagaantgacgtgtttgccaaattctcagcgtttataaaaaacacgaagaaggatgcaaatgagattcatgaaaagaacctgctgaaggccctgaggaagctggataattacttaaatagccctctgcctgatgaaatagatgcctacagcaccgaggatgtcactgtttctggaaggaagtttctgggtggggacgagctgacgctggctgactgcaacctcttacccaagctccatattattaagattgtggccaagaagtacagagattttgaatttccttctgaaatgactggcatctggagatacttgaataatgcttatgctagagatgagttcacaatacgtgtccagcttt

SEQ ID NO: 279 - DNA, 473 bp, Homo sapiens
  misc_feature (352): n equals a,t,g, or c
  misc_feature (357): n equals a,t,g, or c
  misc_feature (365): n equals a,t,g, or c
tcaaacttaagtaaagtgtttccctgagttctgtgagccactttagcaaattaattgagcctaaggaggggggtcatgagagtcccaatgtatagccagttgaacagaagcacaggtcgcaacctgaggcttgcaattaccatctgtagtgttgggtggggggaacaggcttgtgggatctgacactgtctcccagtagatagtgtcagaattgaattgatttttagggcatgcagtcggtgtccattgcagattgctaggtgtgtggggaaaaacctcaacgtatctgttgttagaagtaaattgttgagtgmctgtgtgagtataagcaaaggagtaggaaaaagcaccnttggntttttcanaatattttagagaatccagatgtcttggctctgagccagtcatctgaggaccaaagccaggccgtgcctagtagtgaacctcttctcttgacccaacaagattacaaa

SEQ ID NO: 280 - DNA, 549 bp, Homo sapiens
  misc_feature (126): n equals a,t,g, or c
  misc_feature (490): n equals a,t,g, or c
  misc_feature (499): n equals a,t,g, or c
  misc_feature (548): n equals a,t,g, or c
atacgactcactataggcgattggagctccaccgcggtggcggccgctctagaactagtggatcccccgggctgcaggaattcggcacgagagccagcacacgccctggtatggccacgccaggtntaagacagcaaaacactaaattatggattatttactcattcataaacggtcactgccatgaaccccctgactattagtatcctcctagctctccctggggatcccctgggctgccctctggcccagaagtccaggggttaaactgggtatagtgggagataagagggacccatatcccggatgttggatggactgatgactttgccaagcagtaaatattttgtytatcagccctacatgttacaaaatatttgctatgaacaatagtggcatgtaaagacctgtctacattagccaggtgtggtggctaatgcctgtaatcccaacgctttggaagacccaaggctgggagggatcacatganccccaggangtgggagggccaccccaggggtaataatgtttgaaaccctgtctctaanc

SEQ ID NO: 281 - DNA, 350 bp, Homo sapiens
  misc_feature (1): n equals a,t,g, or c
  misc_feature (240): n equals a,t,g, or c
  misc_feature (262): n equals a,t,g, or c
  misc_feature (323): n equals a,t,g, or c
nactgtgagatggccaatgacggtctgacccgttggccgggccaggtcgcggacaacgtcgaccgtttgtttaagaagcgtggactcttgtcctgagtgcaccgaggctttcagcctgcgggacagtggtgcgatttgcattagagcctatctcccaggactatggaagccccatgcaggaacatggttctgacactttggggattataccctaagcttaaaggactggaaaagcccctnaagtcccgagaccacaaccctncaccttctaaagataagacaagtcactgaaggtctcagaactttggcccattcaacccttncctcaagacaagagttttgccaagcat

SEQ ID NO: 282 - DNA, 517 bp, Homo sapiens
  misc_feature (434): n equals a,t,g, or c
gttaaaaggtaatctgtttagcctccctttccccattctcctgccagaaaagagggagttcaagtcttctttccaggactcctgtgttttggctgagactgattcttcattgtggccttgggagaaaagctgcctaaccagttctgggccctggctagttacaaccatgtgtgagttgtttacagtacgcacaggtatgggctgaagggaaacaaagcttaagggatgactagaaaggcttgctgaaattgctatgggagggccccaccctccaagccatctcccctcacaccccgctcggtttcagtttctggcagcttggttatgcgacattctcttaatccttttttgaatctggtctctacttaagcactcaagaaaactgstccacaaggattgttttagtggggttttaattttttaaaatgttcttngtttatttaaaattgctttgaacaagggggtttagcttgtatgggaagaggttcctgccttttaggctatacaatgttttcca

SEQ ID NO: 283 - DNA, 569 bp, Homo sapiens
  misc_feature (294): n equals a,t,g, or c
  misc_feature (446): n equals a,t,g, or c
tgtatctcgtaaatctttttaaattttcaaaagaaaccagtgtagaaacttgtgatggaacatctcagatacggcaatataataattttgcaaattccattatttaggttactgccatttctaagtcacagaataattcaacagtaataaatatcatgtaacagaataatttaacgcactgattgctactttgatatttatcatcagctttccatttcagaaaacatcacrgaagtacaaataaaatctgcttttctgaatattccaaaaggcagacagcagcttatataattnccgttcttcagaaaacagtaattagattatgtaaacaactgtccgtaagagctaaaagtaaacttggaggttcctgaggattactgaacttatgcaacatgctaactttctaagactaaaactgggaagttccacagatgttaaagattttngtgtgtgtgtgtaaaatgtgaacataggatctatttacatagttgggaattggggacagtttttaacatgttctgaatcagctttaaatgtttatgaaataagcttacaatttgtcttatcca

SEQ ID NO: 284 - DNA, 332 bp, Homo sapiens
  misc_feature (62): n equals a,t,g, or c
agcgcccctcagtgttcatctccagcagagacaacggaggaggctcccaccaggacggttcncattatttatatgttaatatgtttgtaaactcatgtacagttttttttgggggggaggcaatgggaagggtagaaattacaaatagaatcatttgctgtaatccttaaatggcaaacggtcaggccacgtgactaaaaactgtcctgttgtcgaagcttctcccctgggccgccgggagccccgtggagcgcggcctgcacgggagttgtgtccacaaaggcaaagtaaaggggtggaatcatctggaaaaaaaaaaaaaaaaaaaaaaa

SEQ ID NO: 285 - DNA, 827 bp, Homo sapiens
  misc_feature (596): n equals a,t,g, or c
  misc_feature (682): n equals a,t,g, or c
  misc_feature (693): n equals a,t,g, or c
  misc_feature (769): n equals a,t,g, or c
  misc_feature (814): n equals a,t,g, or c
aattcttgtgcctcagcctcccgaatagctgggactacaggcacacgccactacgcccagctagttttttgtattttagtagaaacagggtttcaccgtgttgcccagggtggtctcgaattcctgaactcaggagatcctcccgtctcagcctcccaaagtgctgggattacaggcgtgagcaccttgcgcccagcctattcataattctttatagggcttattaccaaagaacagaaggctttttaaaagtcatctattgtttagtgattattaaaaataagtcttctgatgaggattacatgtatctaactactgtaaaatagatttcatgtcagtgctacataatcagtatctaggttcagtacctgaaagttcatttgaccatgccttttwatgattttaatcctaccatagtcatttttgtcctatttgccgttcacggaaaactttatcagaatataagtaaatgatcttgaaaacattaatatttatcttttttgtacatactatacattttccttaccatacatattatatgttctctgacctctggaacattaactcacaaatttgtttcccgttttcctttaccnaagattgcatgtaagatgtccaaactgtgcaagcaccaaggaaatgctaaatggttgaaggaatggtcatagacttattaaccccncatatacctgngattgtttatgagagccatttgggtccggagtaacatggtataggggtatgactaaagtagggtgggtaagggccnaaaaaggggtaagtgagggtaaggtggggggtggggttagtgganttaaaaaaggtaa

SEQ ID NO: 286 - DNA, 734 bp, Homo sapiens
ctgtaatgctgttagaatcacctttcctgtatgctctcagaaataagtgccgcttttgcaaagtgttaagataatttaatgtctggcttttctgtttcatcatctcatggcatgaggaatgctgactgctctaaacgttgaacttctagaagcttgaacccattgacttgccacgagtaattacttcaggaagactcctgagccagcgagaagccaggacaatgcacaaagcaaaggtactagaaaagaaaatgcaaactccaatgtatacttctgagaacagacaatatttgcataagatgcaagtgctggaaatgatccgtaaaagacaagaggcccaaatggagttaaagaaaagtcttcatggagaggcaagaattaataagcaaagtccaagggaccataaagccaagaaaacccttcaaagcaccccaaggaatgatgaccatgaccttctaaccatgttgcctgatgaaatcttgaacagaggtcccgggcaaacccacagttgaaatttccaatattgttcacacacacagatcgctgtgctgtgggccaaatccccacatcagcaggactgacccaccgctgagagagctgcagaaaagctggctatgtctctggaggtcttgaacttctaagacgcaaaattgcctgctgaaagagacactgctcctacttggagaaacaagacgctcgatcaataagttaattaaataagaaaaggctgaata

SEQ ID NO: 287 - DNA, 85 bp, Homo sapiens
tgtgggtagaacacttcgagcggtgccagcaccgttacctgtgtgtgtgtgtgctggtaggacagttgttcccagggaccacact

SEQ ID NO: 288 - DNA, 341 bp, Homo sapiens
  misc_feature (257): n equals a,t,g, or c
  misc_feature (286): n equals a,t,g, or c
  misc_feature (296): n equals a,t,g, or c
cccacgcgtccgcccacgcgtgccggggattacaggcgtgacacgcgtgcccagctgcagacttcttttaatcattgtactagagtaactgacactatggtttactatcttattttgtctgcccagcatctcttcctgctggggattaacattctttaaatcactcgttaccccattccaataatgtggctctttatttaaagrctwccaaagtcttacatgaccctaccctggacagttgattggtccaggggtanggcacctggacctgaaacacagtgcagtncagttatttncacagaatttatgaaaattgggaagtaggaaaagagactacttct

SEQ ID NO: 289 - DNA, 414 bp, Homo sapiens
  misc_feature (389): n equals a,t,g, or c
  misc_feature (403): n equals a,t,g, or c
cccacgcgtccggraaaattatcttcacaatatatctctttaggacttcactgtatgattataattatgtcaatagaacttcatctaatgctactttttwattttctttaagaaggatgccattatttacgtgaaaatgcaattttycccttcctccctccttctctcccttcctttcttccttcttcccattcttccttccttcgtctctcctttcttttaactgtggggagatttataaaaagagatgtagaaaaaaatggaatctttcagatacaggggaggcctttcttaatcctcggggtacaaagaatgacggataattatagattttacagagcaaacaagccatcttccaaaacctcctcctaaaccatcacagtaaatcnccagcccaaatggntaaaaaaaaaa

SEQ ID NO: 290 - DNA, 203 bp, Homo sapiens
  misc_feature (1): n equals a,t,g, or c
  misc_feature (2): n equals a,t,g, or c
nnctctgcaactatcaggagaagaaaattgtagacatagtggcctgatatgtagccctggaaccaagtatagcagccatctacatctagtcttctagttacaagaaccaaatacattcctatatctaatttactgctataaggtatcttagttgtaggtaaagatgtccctaattaatacattaccattagatccttttggaa

SEQ ID NO: 291 - DNA, 396 bp, Homo sapiens
  misc_feature (38): n equals a,t,g, or c
  misc_feature (231): n equals a,t,g, or c
cccacgcgtccggtccaggtcagttgtcttgaaaaaangttctacattctggattagttggactgattcgccatgattcctagatcaaatgtttccagtaagaacaccacataaggtaatgttacgtctctcccgtgcaccacattatgcatgtgggctgtcccactattagcaataccaagctcggccattttgtaatttttccctttgtaataaataagtcatctgtangtgatattttgagactcaagggtattatcaatgacaattatggaagccagragacaggaggataccaccttcaaagtgctaagaaaaaaataactwttacagcagacctatattgccatgaaaatattactgaaggatgaactcaagataaatatatccttaatt

SEQ ID NO: 292 - DNA, 412 bp, Homo sapiens
  misc_feature (328): n equals a,t,g, or c
  misc_feature (369): n equals a,t,g, or c
  misc_feature (388): n equals a,t,g, or c
  misc_feature (393): n equals a,t,g, or c
cccacgcgtccgggatctccatgcttgcacagggtcttgtctgggacagttactctaatacatgacccagaagcaataaggatattttatataggaatgtattcgtaaatatttttatactttaaagtatttttttcagagttattttggcaggaaatcactatatgctaaagtattccacattatggaaggtagaatggggacactgggaacaccattgtttccatcatcgagtgggaaaaatggagaattctcaacactccaagatggaatagggaatgtaatgcttatagctgggaatgttttttttaaagtgggcggacatggnttagagtatgggaaactaatacattaagggaactcccagtnagtcccattttgttagacnccagnggccttggaaatcccccat

SEQ ID NO: 293 - DNA, 376 bp, Homo sapiens
  misc_feature (362): n equals a,t,g, or c
cccacgcgtccgtttcatcatccacaaactagaagacagtggctacctgagaaactgttaatggagacaaatttcctagtacataacagcaggccaggtctcttttcacttttgtaactgccatgcatatagactacatctattccttgatatgaaaccaacaaatcaagttactttaaacactgcaccctttatacaggttgagtatctcttatctgaaatgcttgggaccagaagtgtttcagattttagaatatttgtataaacatgatcaggtatcttggggatgggacccaaatctaaacatgaaattcattcacgtttcccacacatcttattcacatagactgraggtaattttntacaatattttaat

SEQ ID NO: 294 - DNA, 375 bp, Homo sapiens
  misc_feature (337): n equals a,t,g, or c
  misc_feature (344): n equals a,t,g, or c
  misc_feature (360): n equals a,t,g, or c
cccacgcgtccgcacaaataggataatatcctgtgttcatacattagaagatttttatattatcaaaatgtcaacactacccgatgtgatgaacaaattcagtgcaatccctatcacaatctcagtgacttttttttacagaaatataacaaataattccttctatttaccttatttttagagatagggccctcttctgtcattcaggctgtagtgcagttgtccaagaatagctcactgcagcctcaaactcctgggactcaagtggatcctcccacctgcagccttccaagtagtctttagagtagctgggattacaggtacatggacaccacancgggctnactcctttaatttttnaaagtggtattagag

SEQ ID NO: 295 - DNA, 346 bp, Homo sapiens
  misc_feature (315): n equals a,t,g, or c
  misc_feature (317): n equals a,t,g, or c
cattctaattatgcaacaaaagctatcatcatgtccacagcttcaagttacctcttgtaactaacacttcctaaattcctatggctaaattacaaatttctactcaagtgaattaagtcctgtgattagacacctactttccctgaaggttttaaaattatcttcagattctggctttcatttgtcttcccaatggctttctgttcccttaaatttgtcctccatctctgcccccaattactcagctctttcctacagaggattttaagtagctttactgggggtatggtagaaagrgaaagggacttgaaggancnttaaggcatcaaaaatagtccaagtgggc

SEQ ID NO: 296 - DNA, 368 bp, Homo sapiens
  misc_feature (288): n equals a,t,g, or c
  misc_feature (304): n equals a,t,g, or c
  misc_feature (362): n equals a,t,g, or c
cccacgcgtccgcttgtcttgaactcttgagctcaagcaatcatccccacttagcctggcatgatggtgcatgcctgtagtcccagctaactgggmggctgaggttggaggatcacttgagcccaggagttcaaagctgcagtgagctgttatctcagcactgcattccaccctgggcaacagagtgagactctgtctcaagaagagaaaacaaaacaaagcaaaacaaaggatatgaatagataatcctccaagggaagatatacgaatggcaaataagcacacgangaacggctgcactatncattagctatccagtgaaaatggcacattggaaacccacaatggaaaatggccatttncacaac

SEQ ID NO: 297 - DNA, 402 bp, Homo sapiens
  misc_feature (150): n equals a,t,g, or c
  misc_feature (153): n equals a,t,g, or c
  misc_feature (344): n equals a,t,g, or c
  misc_feature (386): n equals a,t,g, or c
cccacgcgtccggttattacaccttttctaacccagccttgaaaatcatgctgtgtattacagggagtcactaagtctggtctatattaaaggggactggaattagcctcctacttttgctggaggcaagttagactcctactttacgtnggnaagcaagttaaagaatttgtggatatgttttaaagccccacagcagtgatacttgagcaaaggaggtgaggacatccagggaaaaatattccaggtacatggtacagatacataaagaccctgaaggatggatggatgcctgatagtttagatttgcttatagattagttaccacggcacagcatgcaccnccttgagagcagggtggaacagtgttgggggagaacatgttngaaagatattggcatt

SEQ ID NO: 298 - DNA, 333 bp, Homo sapiens
  misc_feature (320): n equals a,t,g, or c
  misc_feature (333): n equals a,t,g, or c
cccacgcgtccgggcatgtgagtgcatctattcacttggcactcatttgtttggcagtgactgtaagccagatctgatgcatacaccagcttgtaaattgaataaatgtctctaatactatgtgctcacaatagggtaggggtgaggagaaggggagagaatcacaactgcataataataatgtaagactggcaaatgcactgagagagagagatgtgcggggaatcagggaatcataggagcccaggggargtgctctttacccagcccaaaaccatagggagtgtcaggtggcccttccagaaaagaagactccygtnccttcctttttan

SEQ ID NO: 299 - DNA, 311 bp, Homo sapiens
  misc_feature (306): n equals a,t,g, or c
  misc_feature (310): n equals a,t,g, or c
  misc_feature (311): n equals a,t,g, or c
cccacgcgtccgagagacctttcacctgtctagtcagctgtattcctaggtattctattcttttttgtggcaattgttatcttattttataaagttgccacaggcacaccaccctgatcagcagcaatcaacatttaggcaagaacttctaccagcaaatagattatgatttgctgaaggatctgatgatcgttggtatttttwagaaataaagcattttaaaattaaaatatgtactttttttagacataatgttcttgcacacaataggctatagtatcgtgtaagcttaatggtttttttttntttnn

SEQ ID NO: 300 - DNA, 377 bp, Homo sapiens
  misc_feature (147): n equals a,t,g, or c
  misc_feature (159): n equals a,t,g, or c
  misc_feature (369): n equals a,t,g, or c
cccacgcgtccggtgaggacacaccaggggccacactcgcagaaccggaaaggacgccagcaccgtgcgtgaaaaaaaagccaagaaagtccaggtgacaagttcctatgctggaacccggccctgcatctacattctcctcttcgntgatagccaggntgcttctctctcctcttgattgatgttttagtctgagctgtcattagttaaattaattttctctccaagatagtggaataaggtccacaaaggcaaatcttatgaggctgtaaaaatagaccatcatttggaggaaattcagatgtgttccctgctcttgtcgttgctgcagaagaacactttaatttgatatgaatcctcaagagaaanttaaataa

SEQ ID NO: 301 - DNA, 257 bp, Homo sapiens
  misc_feature (2): n equals a,t,g, or c
  misc_feature (27): n equals a,t,g, or c
tnctaaaaggacaggtaggtatgtgangttgtcaaaagtttttggaaagtgaaggtattaccaggcatggtgggctcacaccttattagtctcagctactgggggaggatcacttgagcctaggaatttragaccagcctggacaacacagtgagactctgtcaaaaatttatttttaaagtgggaaaaaaaaaagggcggccgctctagaggatccaagcttacgttacgcgtgcatgcgacgttcatagcccttc

SEQ ID NO: 302 - DNA, 282 bp, Homo sapiens
ggaagctacatcaaattccttcctttcaagggaagaatgaaaactaaaaattaacagtaaagacatattcagcagatttcaaaattaaagatactcgaaaggctcttaggaaagcccctgtggttactaatgacactcatgaaaaaggtaatataattcccagggcagattagttgctgtttcttccttctcttgtgagacatcatttcatttcttttttatggcwttttaaargcactttcacgaggttagaaaaaaaaaaaaggggggccgccctagggg

SEQ ID NO: 303 - DNA, 361 bp, Homo sapiens
  misc_feature (347): n equals a,t,g, or c
  misc_feature (348): n equals a,t,g, or c
  misc_feature (349): n equals a,t,g, or c
cccacgcggtccgctttaaaattgactttctttttttctcctctctccatccttcgtcttcttttacttcacaactgtttatcaaaacccaaatatgtscgaggctctaggctaagtcttagagaaataaattacggggaaaaatggaagagaaaagatgtacagtatgagtccccatccaggaggaatttatttttttstggaaaaggtagatttaaaaaaaaagaaaaagggcggccgctctagaggatccaagcttacgtacgcgtgcatgcgacgtcatagctcttctatagtgtcacctaaaattccaattcactgggccgtcgttttacaacgtcgtgacnnntcgaagaaaaaa

SEQ ID NO: 304 - DNA, 385 bp, Homo sapiens
  misc_feature (335): n equals a,t,g, or c
  misc_feature (339): n equals a,t,g, or c
  misc_feature (367): n equals a,t,g, or c
cccacgmgtccggmattaagtaccagttatccacaatggtaacttccttgaaaattcacccattactagctgaataatgactgaatttgtttccttttgtatatctttttyctgggatcaccttccagataaactactcatacttggttccttgtttcatggcctgcttctcaagaacccaaactattataggcattttcaaactaaatttgaagatgcaaatatcaataaaacagcaattccaatcctaggtatttaccttagaggatcaacttcttatgtgcactgggagacacctccaaaaatttcacaatattccattttgtgttagcaantaangggaaaaatggacaaagggttaaataanttattgtcttccataaca

SEQ ID NO: 305 - DNA, 414 bp, Homo sapiens
  misc_feature (281): n equals a,t,g, or c
  misc_feature (313): n equals a,t,g, or c
  misc_feature (348): n equals a,t,g, or c
  misc_feature (393): n equals a,t,g, or c
cccacgcgtccggtcaagacaaatatctgctttcactcctcctattagcatcacactggggatcttagcctgcgaactgagacaaaataaagaaagaattgacatatagagtgcatactaagaaacaaaactgcctctattttcagaggacatgacagtcaacatacaaaatgtacaaaaagttcttagatctcataagtgaacttagcaaggtctcataatgcaaagaaaatatacagaaatcaatcatattactatattacagcaattaagagtagaantctggaagtttttaaatggacgtcagttacantagtactaaattaaaattaagtacttgggtataanttaacaccatatgtgaagatgtctgcactggaacttaccaacgcngggtaaaaggaatccaatatc

SEQ ID NO: 306 - DNA, 389 bp, Homo sapiens
  misc_feature (328): n equals a,t,g, or c
  misc_feature (332): n equals a,t,g, or c
  misc_feature (367): n equals a,t,g, or c
cccacgcgtccgccagcactttgggaggctgatgtgggctgatcccttgagctcacgagtttaagatcagcctgggcaacaaggtgaaccctctgtctacaaaaatacaaaaatctsctgggtgtggcggtgcacacttgtggtcccagctactctggaggttgaggtgggaggattgcgtgacctgggtggtgaaggttgtagtgagccaagattgcaccactgcactacagcctgagagatagagcaagactctatgcattagtccattctcaaattgctataaagaactacctgatactgggtaattccatgaagaaaagaggcnttanttgactcacagttccacaggcggtacaggaagccntggctggggaaggctccaggaa

SEQ ID NO: 307 - DNA, 417 bp, Homo sapiens
  misc_feature (362): n equals a,t,g, or c
  misc_feature (375): n equals a,t,g, or c
  misc_feature (377): n equals a,t,g, or c
  misc_feature (417): n equals a,t,g, or c
cccacgcgtccgaaaagtcaaaaaataacaaatgccagcaaggttgtggagaaaaaggaacacttacacagtgttgtgggagtataaattagttcaaccattgtggaagacagtatggagattcctcaaagtcctaaagacagaaatatcatttaactcagcaagcccattactgggcatatacccaaaggaatactttagattcttaatataagtaggattatgtagtgtttagtcttctgtatctggcttatttcacttagcataatgtcttccatgttcatctatgttatagccaatggcacaatttccttcctttctaaggctgaataatattacatatgtatatatactacatttcnttttccattaacngnttaaggacatttggtggttccaaacttgggcaccggggan

SEQ ID NO: 308 - DNA, 270 bp, Homo sapiens
  misc_feature (267): n equals a,t,g, or c
  misc_feature (268): n equals a,t,g, or c
cccacgcgtccggtaaaagcaacttgggaaagtagagacaatcagggtaggccagtctgtcaagggacttatctgggcatgaaaggagaaatattgtttgaggctagaggtggggttcagtgtcaagagagggttcttcttaaataagatggaacttcactgtacctgaaaaagacctatagaaagagtaaaaggaataatagctaagcctttaataaaatggaacaagatatcatcaagagtaaaggagaggtattatccctaacnngg

SEQ ID NO: 309 - DNA, 165 bp, Homo sapiens
  misc_feature (162): n equals a,t,g, or c
cccacgcgtccgacacaatgaagtccaaaaaatagaattaccaggcagactatgtaacamctgtsctcactatatacaatgagatgaaagtcaagatttaaaatgttggcagggaaccagcaaccataaaatgtgatatcatagattaaaaaaaaaaaaaanggg

SEQ ID NO: 310 - DNA, 361 bp, Homo sapiens
  misc_feature (340): n equals a,t,g, or c
  misc_feature (347): n equals a,t,g, or c
cccacgcgtccgcccacgcgtccgcccacgcgtccgccagaataatgtttgaacaaatatcgaggcacccggtggccttgtcagattgacgcataaaattaaccaacatacacactcaagaagaaataaagaaattgagtagcctaattacatgactattattaacctaattattttgttaacctgttaacaaaattgrrttttagttataaacctttccaccaggaatcctctgtactcatatggttcactggtaaattctactggrtactwaggaataaagtagaactaattttacacargctctttccrgaaagttggaaaaagcagtkattacttntggaacncattcctaaagaga

SEQ ID NO: 311 - DNA, 350 bp, Homo sapiens
  misc_feature (195): n equals a,t,g, or c
  misc_feature (343): n equals a,t,g, or c
  misc_feature (349): n equals a,t,g, or c
cccacgcgtccgcactgcactccagcctgggtgacagagagggactctgkctcaaaacaaacaaataaacaaaaaatattaactaattaattaaattaaaaataaaaataaataaataataagcaaaaccaacaatccaatatctaggctaaaaaaaaaagaagactgaaataaataaattcagtgattaaaagngacattacacctgataacaaggaaataaaaaaaactctaagagatacttatgaacaattatacaacaacaaactaaataacctagaagaaatgggtaattcctagacacatataacctatggaaagggaaggaaagggagagtttaantggtcnc

SEQ ID NO: 312 - DNA, 475 bp, Homo sapiens
  misc_feature (399): n equals a,t,g, or c
  misc_feature (412): n equals a,t,g, or c
  misc_feature (430): n equals a,t,g, or c
  misc_feature (448): n equals a,t,g, or c
cccacgcgtccgcataaacaaggaaaaaaacaccaaatgaaatcctttaaaaagctccatataacataaaagtagggacccactgctacaaagtactgttaaaaaatatgcgtgaaagttcatcatggtaaaagaaggaaattaagaatgcacctgctttgagttattaaaagataaaaaggttatctgtaaaagagtatttaaaaaggaagctgataaagataaaaaaaactgccaatattaagaaaagaagtcatagaaattaaactccattgcggaatgaagatccacactggggacagttagggccagatgttttatataatggaaggaaaaattttaagaattaagatgatagatatggggaattagatttggaagccatgattaatggccgcntggagatggaacnggatggattggccagaanttttatttaatttattanttaaggccttttaagaagtttcccgaa

SEQ ID NO: 313 - DNA, 319 bp, Homo sapiens
  misc_feature (252): n equals a,t,g, or c
  misc_feature (256): n equals a,t,g, or c
  misc_feature (268): n equals a,t,g, or c
cccacgcgtccgaagccttgggtttatatgacatcacagggcaagatgatctatagacaggatggagaagaatcacactcatgccatcacgtgacatgcctgaattcacaggaaatattgcaatcaagcaaagcactctcctgatgaatccagtcaaagcctcagaatccttctacacagtatgtcaggcaaccactgacaagtgatcaaagttggcaactataggccatcctgatataaaaaaaaaaaaangggnggccgctctagnggatccaagcttacgtacgcgtgcatgcgacgtcatagcccttctataggg

SEQ ID NO: 314 - DNA, 1052 bp, Homo sapiens
  misc_feature (10): n equals a,t,g, or c
  misc_feature (24): n equals a,t,g, or c
gaaacttttnatggaaaccctctngtaagtggctggaggatttttttttaattackgattactttttaataaaaattacaattttgaaaaattaaacatcattaatttttatttttacaatataattatccttctcttgacttcatatctttccttctttggggggtgcttaaaataattctcactagattcaataacccctagccaaaactgggtcagtaaaccaaataaactgaaattagaatggtatttttttcattttttttccaaatagcaaaactgctgtggttcaacttcaagccatttaccaaaacaattacctaagtaatcatttcacctacaactacttttagttaaaaaaaaacaaattaagccaagtatgcaaagcacactcagatatcctccaacagtccagcattcatgaatctacacagcaaaaccattttgcatctcccagtcctcatggtttcacatggaaatcatcaggatctaattagtgactcagagaaagaaagcaataatagagtgccgtggcgcgcctgcaaaatttataggtcactaaaagtcacccatagcaacaaggcttcttgtctcaggtctgcagtgtgtcacatgccagactcctcagactcaacaggcagctctgcacatccacaatcaaggagcttgttttccacacttcatggagacttccctcttgtctagtttgacttcctctccatttttagcatcagaaacacaaggaaataaaattcgtggttagattgatgtttcttccccctgctctttcatctcctgctatgccaggaagtagcattaaagttctatcatgcggttgcccaacaggacacaggaacccaggaccttccaacctgatgactagtgagtgcaatacagagagctggagctgaggcttaattacacaggaaggagtagcactgaagtaagatcaggttgctgaatcacgaaggaggacattttgcaacatatagatgatatatatacactcacatttaaaagcattttttctttaccatgacaaaccactcgac

SEQ ID NO: 315 - DNA, 473 bp, Homo sapiens
ggagcagcaagggcccccacagtggtgtggcacgtcatccgagtccacacagggcaggcagagccagagatgcccagtgccagcctcaggtgtgaagccagaaagacctgctgaagcacgtggctgcaactgagagagcgacccagggaccctgagtcagttcacacacgagggctcgtgcgcaaggtccttgtcaaatgccacctacacctggggccaccctcattgaaatgtcactcccagcccctcaattcccacttgctagttgcctactctactgtatattctagtttcttgtttattgtctgtttccccctaatgtaagctccctgagggcaggaaagatgtctgctctgttgtctgccccacgtgccaagccctcagtgctaagcgaataagggcaagtcagtcagtgggaaactgctggcaccgggcaggccctgcctgagtgccatctgtcctttttattgttg

SEQ ID NO: 316 - DNA, 463 bp, Homo sapiens
  misc_feature (433): n equals a,t,g, or c
  misc_feature (448): n equals a,t,g, or c
  misc_feature (453): n equals a,t,g, or c
  misc_feature (458): n equals a,t,g, or c
agggaaataaggcagtatttgaatcacaagatatattttttatctgcaaccatggatccaatgatctgtagagctttttcactcattaactgtcaggatatgaaggactgacagtctgtaaagatatttatatttttgtatagttgttttcatagatttctcaaaggctgaagttttcaacctagaagatgagatttgtattgagtatagaaatgatgtttcctatctagtttgtaaataatcatggtgcacttgaggggtctcttggaaactcctagggggtcaagaatcactattctgaaactgtatagactgggatttaggctgctgcattttgcctttcttaaataattatattttgggaatgtaacccctgttctgtcttcattgacagggattgcttgtgttgtttaaaacactaacacagggcctnccgtgcccggggccntgccnagggngatgc

SEQ ID NO: 317 - DNA, 502 bp, Homo sapiens
gacaacacctatagtctggagctcttccaggagatgcgaaccacccgcaagtctccgtctggcctgtgggctggttggtgggcggcgctacgaacgtccgctggtggaaaacggcaaagttgttggctggtacaccggctggagagcagacaggccttttgccatcgacatggcaggatttgctgtaagtcttcaagtcattttgtccaatccaaaagctgtatttaagcgtcgtggatcccagccagggatgcaagaatctgactttctcaaacagataacaacagtcgaagaactggaaccgaaagcaataactgcactaaggtattcattacacttgtgctgcccgacctcgagtgtcaccatgaagagtgcgctacccaagctatttccttccccttcaggttctcgtgtggcacactcggacagagaaggttaatctagccaacgagccaaagtaccacctggacacagtgaaaattgaggtataaattgaagcagc

SEQ ID NO: 318 - DNA, 474 bp, Homo sapiens
cacaattacccttgaaccagaagacaatgaatgatttgctaaacagatggcatagtctatgacatgcatcatatgtgtgagcaatcacagaaggtatgacttttctcatgaaatattttcagacaaatattttaagttaatctaacattcactaaatctacctactgattttaggtagattttctttctccaaatatacatttttaaataaaaattttcattgtattgcattgtattttattggttatcaacagcaccatgttcytagtttttttaaaaaaaatgtttaatgagtkgtaatawttgtgtcttwaagcaaggggttccctcatttttcctgtcttttctggcttgatttgaagttattcctgggtatcaatattctacacacattgtctactgcttacctccaacacagcagttttcactgtcatgtaattatttgtttgctcatcgctcttccccatgaccatc

SEQ ID NO: 319 - DNA, 449 bp, Homo sapiens
  misc_feature (261): n equals a,t,g, or c
  misc_feature (290): n equals a,t,g, or c
  misc_feature (326): n equals a,t,g, or c
ttggattttggaatatttgtattatacctactgtttgaacatcccaagtttgaaaatctgaaaccttaaggtgttaacatgagcaccttaataaagtttggacagtatttcttttataaacaatattattgatattgctaactattaacattagaaatgaaagtcgagaaagataattacctggaacgttagtacccagaaatacccaattgtgktggtatttgttttaagttttcatttttatgcatctccacctcaganccataatctaaatttacagttgaattcanttcaatacctcagtggtgtaccattgagtcctaaanttctagaatgttaatcccagtcatgtgtgtacactaacatgccttttttgaagtcttttgaaacctatcagatacagtgtggagtccattttgctgaagagtatctagaatatctgctaccct

SEQ ID NO: 320 - DNA, 289 bp, Homo sapiens
  misc_feature (178): n equals a,t,g, or c
  misc_feature (219): n equals a,t,g, or c
tggtggctacatctttwctgtattctcagatatgtcgttaaagatggtgccacctatagtggccattttcgttatctaaacaaaaccaacatctgttggattgaaaaactatgctatgatcgactgctttatgtgtgtatgttttttttttttttttcaaatcccttaagattctttnctataattagttttctttgaagaagcttgggaaagttttcngcattgaggatttaggaatccacagtgtttctgtaatttaggctttccggggtttttgaattttaatttt

SEQ ID NO: 321 - DNA, 467 bp, Homo sapiens
  misc_feature (338): n equals a,t,g, or c
  misc_feature (381): n equals a,t,g, or c
gcctggtaaagcaatttattcaaagcccacggcaaaaatcaccctagccctgcctctgcctcagttatttccacacctacccccctgctttgtagctaccccaaggtggcggtagtcaaagtcccctgagggctggggaggaagctacccggcctggctcgcattccaggccccactgtaggccaaagcatcattttaagaggacaatggatttgtttttattaatttttttgctaagaaagtttctaggtggcaggtgctgtccggggagggggcgtgcgcagcagacacagcagccaaactgtcctttctgcttccgtctgttgtgccagccctgncgcctgccagctcttgctccctcagagccagaaggttcttggncttcaggcttcctggcctggatgctggcagcccctggggagaggacccaggccccctctagtaatggccaccaccctccccccagg

SEQ ID NO: 322 - DNA, 1114 bp, Homo sapiens
ccacgcgtccgggtgaccacctcagctggaggcacaaacaatctatccgattcctatgctgcaggattcttatggttgaacactttaggaatgctggccaatcagggcattgatgtcgtgatacggcactcattttttgaccatggatacaatcacctcgtggaccagaattttaacccattaccagactactggctctctctcctctacaagcgcctgatcggccccaaagtcttggctgtgcatgtggctgggctccagcggaagccacggcctggccgagtgatccgggacaaactaaggatttatgctcactgcacaaaccaccacaaccacaactacgttcgtgggtccattacactttttatcatcaacttgcatcgatcaagaaagaaaatcaagctggctgggactctcagagacaagctggttcaccagtacctgctgcagccctatgggcaggagggcctaaagtccaagtcagtgcaactgaatggccagcccttagtgatggtggacgacgggaccctcccagaattgaagccccgcccccttcgggccggccggacattggtcatccctccagtcaccatgggcttttttgtggtcaagaatgtcaatgctttggcctgccgctaccgataagctatcctcacactcatggctaccagtgggcctgctgggctgcttccactcctccactccagtagtatcctctgttttcagacatcctagcaaccagcccctgctgccccatcctgctggaatcaacacagacttgctctccaaagagactaaatgtcatagcgtgatcttagcctaggtaggccacatccatcccaaaggaaaatgtagacatcacctgtacctatataaggataaaggcatgtgtatagagcagaatgtttcccttcatgtgcactatgaaaacgagctgacagcacactcccaggagaaatgtttccagacaactccccatgatcctgtcacacagcattataaccacaaatccaaaccttagcctgctgctgctgctgccctcagaggaagatgaggaaggaaaaaaactgggtggacctaaaaaaacccatcctctcccaaaaaaaaaaaaaaa

SEQ ID NO: 323 - DNA, 487 bp, Homo sapiens
  misc_feature (393): n equals a,t,g, or c
agaacgcataacaagctggtttgaccagaaacagaactgcctgtgacagattaagagacaagcaaggcttggaatctgagagcaagcaaagagagtggaaatttacagctgccctatgtgagtgttcaagtgatcattttctggtaacgttttccagtggtaactgttactcttcaaaaagagggacagaaagtcaagacctaattgtggaaactcttttctctgccacgcttggtaataggaggcaacctctattaaatggacgataaaggctacttcatctaaagtgctttgagctcaagaaagagctgtcttcagcacctcaccatgtgtctacattttgttgcttagaaaagcctaggcatttctgtaacatttgcattccatattggnagaagagatttctacacatgaaaaaaatgcctttgtttagtaaatcacacaaaaatccagcagaaatttgtgaaaatcctgaaagacaatttgg

SEQ ID NO: 324 - DNA, 347 bp, Homo sapiens
tgaatatattgttacttttttctggcactggaatatacaactatccatgacagcaaaatttgagggccatattgagatcaccggctgatatggtgaccatgtaaatataagtttaaattgcttagttccacgttagaatagtttaatcaatttctgtcccagaaactggatatgaaacaggttagatgaggaagcttatatggaaaaaaattatctttcatcctctccacatatacatttttcctgagactaggtcatatgtatattcattttgtacacattggggaattggcatagtaatttattcaacaaacattaattagcaccttactttgtgacaaatctgt

SEQ ID NO: 325 - DNA, 460 bp, Homo sapiens
agtttaatcctttacttcagtctgtaagatttcttctcttttcccatggggatagaggaaatagatagcaaaccatctcattcaagccaattcagttcttcaagtgtttattgaatgcctgctgagttctggacaccagggtktgcagcaagggacacagtgctcagacatgaagaatggaaagccacagggttaattgaaaagtagacttggcacaaatcttacactaccacttgttaactaggtgactttgtgcaagttctttcatctttctgtagtgtaatgaatgagaagagattatgcgtgaagtcagattgattagagggctttaatcttggcccctgtctctttagcttttcatctggaaaatgggtatattgctagccaaggccattgttatgaaacacttaacacagcacctggctcatagcatgattcagttattgctgcttcagttatt

SEQ ID NO: 326 - DNA, 350 bp, Homo sapiens
ttttttttgtgtatatcctacagttattttctttttggttaccatgggggtgatatttaacaccctgaagttatactactctgatgtgaatgtataccaagttaacttcaataacatataaaaactgctcctatacagctccaaccccatcacctttcagccattaatgccacaaaactacatctcaatgtgttgtgtgtccaaaacacagaytaataacttcttgatacataagtctcttaaatcatgtagaaaacagaaacactactagcttttataatttgacatgtatttacctttatcagacatgattatatcttcatacagatttgattkcctgtctaatgtcc

SEQ ID NO: 327 - DNA, 407 bp, Homo sapiens
  misc_feature (309): n equals a,t,g, or c
  misc_feature (348): n equals a,t,g, or c
  misc_feature (373): n equals a,t,g, or c
  misc_feature (379): n equals a,t,g, or c
  misc_feature (386): n equals a,t,g, or c
ggcacagcttggaatgaacccctgtggataagggggactattagatagaataaacatcaataaatgcttgatgaataaacgctaatcctaccttcccagcctgacacctcccagtggacaccacacttcacttgaagccttagaaacctttcccacccatgcttccagccctggcttcatgttgccatttctcacccccagaacaggccgcccgcctgaagaaactacaagagcaagagaaacaacagaaagtggagtttcgtaaaaggatggagaaggaggtgtcagatttcattcaagacagtgggncagatcaagaaaaagttttcagccawtggaacaagatcngagaggagcattactacatgatgtnggtggnaaktggnttgggcctkgacatccttttt

SEQ ID NO: 328 - DNA, 997 bp, Homo sapiens
  misc_feature (887): n equals a,t,g, or c
  misc_feature (904): n equals a,t,g, or c
  misc_feature (979): n equals a,t,g, or c
  misc_feature (994): n equals a,t,g, or c
gcggccgcccttttttttttttttagatcagctcttcacccactgttttcctgtcatacacatggtgttcttaaaattgtaaatgaaaactcatttgaacttacattagtaacttctgttaaattatactggattgcttattaagtaagcattattatccacattaaatctgtcacagatgaaaaaattacacataaaggagactgcttgaggccccagggcatgctgtaatatacatagaggctcctgaatacttggttttccatgtggatctctgattttgctgaaagaagtctgtaaactgatgtagtcagacagctccccactggctacacatctctatagaatttagaagcattgtttatttcagcagaggtctggaatgaattttccttataatttaactcctgaaatgactgtttcaaaaggtcaactgtggtgaacttgcatatgtgacttgcagtcacagctaagtcacgatcccttagtttttccagaagtccactagaacgttagctccatggcactgttatcttgcatctccaggtcctgaaacagcccttagtgcatactaggtattcaataacttttttttgaataaatgttttatgtaaattccatcacaaatatggaagatcttagaggggatttttgaaaaccaaagaaagttgaaactccttcacatggagtttggatgttgaacttagaggcttgacttagccatttttaaaaaacgaaatgtgtgtgtatgtttatttaaggtaccttagtgacaggtacaacctacagcccaaagacaatgtacaaaacccaatgaggggacaagcctccactcttttataagatgcagaaatttgcaggagtctatcactcttactctaaccatnccaacagaccagaagcnctacaaatgacagaattatatgttgttgctttcatttgcatgtttcacactcatcagagaaccccggggccagtnaacctaaacaaaagnaag

SEQ ID NO: 329 - DNA, 520 bp, Homo sapiens
gaattcggcacgagcttgaacacagttgccgttctcccctgaagtgacagattaagtttgtggagcaggttgaatgtgtcacacagactttgaatgtttgagactaccttggccaccagattgtgttacctggaagtttggtcccaagcaagaagccacagggagagacagcgaggcaactctatgcacatgcaatgaacactgagactgatatcactgagactttcagaggacaatggactcattatggatctcacatctttcctagactctgttctttgctcttgggtcttctctactcagactacctgcccccaaatgctccatcctcaccaaaatwtaaagattgagaagaaagtgggacaaagggtgtggaataaaaaatgtaagattggytatcaccccaaggtgatcaaatctaatgttggctttgctccagcggatctgtgaccaattttgtatcagtcccagagcacagcgagcctgttcaggctcttgtaagtgargacctgtggttgaa

SEQ ID NO: 330 - DNA, 549 bp, Homo sapiens
  misc_feature (547): n equals a,t,g, or c
gcgcgtaatacgactcactatagggcgaattggagctccaccgcggtggcggccgctctagaactagtggatcccccgggctgcaggaattcggcacgagtttaaagctgccaccttgctgctctggcatccataagatacttcagaggtctagctagtcctcagcatggttgacagagtcttagagataagtacatttagttcagcaaagtgctgggattgcaggagtgagccaccgtgcccagcacccactcccagtcttctagtccaaatcactggcttcaagcccttttcattgcagcccacaatgagaagcacatcttacaatcagacccagggtatgccttcccacccgcccccaccacacacacagatagttgttttgttgttgttgttgttgttgttgttttcctttgagacagagtttcgcgtttgttgcccagcctggggtgcaatggcgtattctcggctcactgcaacctccgtctcctgggttcaagcgattctcctgctcagctctgagtagctgggatacaggcacacgcanca

SEQ ID NO: 331 - protein, 37 aa, Homo sapiens
  misc_feature (30): Xaa equals any of the naturally occurring L-amino acids
  misc_feature (32): Xaa equals any of the naturally occurring L-amino acids
IKENEGKGGRWQNESWLHSGWLMGEREIVXIXRNRTQ

SEQ ID NO: 332 - protein, 32 aa, Homo sapiens
  misc_feature (26): Xaa equals any of the naturally occurring L-amino acids
SLLCDVQAGLEAQLIPMAPHTLMSFXLCWLPY

SEQ ID NO: 333 - protein, 24 aa, Homo sapiens
  misc_feature (22): Xaa equals any of the naturally occurring L-amino acids
IRLGIQVGQPAEDEFVAVNRNXTQ

SEQ ID NO: 334 - protein, 55 aa, Homo sapiens
  misc_feature (21): Xaa equals any of the naturally occurring L-amino acids
AINEAECHELMWKFSQMMMIXRRKQQNNMFSVTSFTYERERDRKGRRRQSKTTIN

SEQ ID NO: 335 - protein, 83 aa, Homo sapiens
FMKNRNLFPTVLKVGGSPKSRLQQIQCLISCPLLSRWSLVSVSSLGRRNELAPLSPYIKSLILSIRVELVWPNHLMKAPPLYF

SEQ ID NO: 336 - protein, 147 aa, Homo sapiens
  misc_feature (105): Xaa equals any of the naturally occurring L-amino acids
  misc_feature (106): Xaa equals any of the naturally occurring L-amino acids
  misc_feature (126): Xaa equals any of the naturally occurring L-amino acids
FCVVERLVDCLLPAVFYGASGCRQARCEPQSVGASDNSRAGGGALRRQEGPETATRMWSCSGHSLREGRCLGFYTLSTTSLFCSQGVSAVGVTVFRLCIRLQLFXXICSCSYSSLYINNPKRVSQXKLLNVICCILSVFLLTSFSWK

SEQ ID NO: 337 - protein, 57 aa, Homo sapiens
PMPLTPELLEGIVSSLPFPCIQKASMNDGLTKKKKKRAAALEDPSLRTRACDVIALL

SEQ ID NO: 338 - protein, 108 aa, Homo sapiens
PRVRMCVGQQERQSTTFLIYLTFGSSLRIAYKIVTARIYLFIDKKAHTSLISNLSRRLMSSSFGTSAAFLSSDPFILLQVCGSPSSASKYSSSDSKGKRHLFDLRHVH

SEQ ID NO: 339 - protein, 52 aa, Homo sapiens
  misc_feature (2): Xaa equals any of the naturally occurring L-amino acids
AXLIKTRVLIYNKSNFSLSLGTSNCTPQITDTSEFFMVKKAPTLTYKCGPRN

SEQ ID NO: 340 - protein, 34 aa, Homo sapiens
  misc_feature (29): Xaa equals any of the naturally occurring L-amino acids
ITKIVNSQPENGSPREKCFIDADATLALXKSAGF

SEQ ID NO: 341 - protein, 51 aa, Homo sapiens
  misc_feature (34): Xaa equals any of the naturally occurring L-amino acids
LIPAEETYLKNRMSQLMVNKYIRRNRTFQHGKNXLKETLRTNSRTMEKPIP

SEQ ID NO: 342 - protein, 50 aa, Homo sapiens
  misc_feature (15): Xaa equals any of the naturally occurring L-amino acids
  misc_feature (48): Xaa equals any of the naturally occurring L-amino acids
HFCANKFQLCLYIIXFTLGIHLSICNSIIRYILSGIYVLYTHIPLKGXDN

SEQ ID NO: 343 - protein, 70 aa, Homo sapiens
SPALLLASSCLPRLSCPTYSPCRCPSFSLHCLPLEHARDIAFCPHCLEDLPPRLITPHGAAARVGAVTFC

SEQ ID NO: 344 - protein, 37 aa, Homo sapiens
CVEKMEFLVLCCLLIICSSYFIEAVILLLNKFYISIF

SEQ ID NO: 345 - protein, 56 aa, Homo sapiens
RFKPCLSRGFLLPPVPQSCSGRGLESRAAASSLSGGLRSLCCCPFPLEICEKGELR

SEQ ID NO: 346 - protein, 44 aa, Homo sapiens
  misc_feature (34): Xaa equals any of the naturally occurring L-amino acids
TQCLVQQMLLNVNISTMMSDDSVMYRYVLPFASXSQQNRTHHII

SEQ ID NO: 347 - protein, 89 aa, Homo sapiens
  misc_feature (26): Xaa equals any of the naturally occurring L-amino acids
  misc_feature (30): Xaa equals any of the naturally occurring L-amino acids
NSAECPPTPHDHPLYSLGPHPLPGFXHHFXLISCPLSASQAPHLLPGSRSPSSACPLADIPGGFQGRSGQPLPLSMGSSILCRGGAIAS

SEQ ID NO: 348 - protein, 90 aa, Homo sapiens
  misc_feature (77): Xaa equals any of the naturally occurring L-amino acids
DTNQMNVHNLAIVFGPTLFQTDGQDYKAGRVVEDLINHYVWVFSVDEEELRKQREEWPIKSLKVYLGVKKKLRPPTXLGLSQWCMRQRKH

SEQ ID NO: 349 - protein, 51 aa, Homo sapiens
  misc_feature (44): Xaa equals any of the naturally occurring L-amino acids
QFRRQIGEAAWNLIFCNLRVVSKVSVCRHFQCSAVGFSSAVWQXRFPLATS

SEQ ID NO: 350 - protein, 33 aa, Homo sapiens
  misc_feature (29): Xaa equals any of the naturally occurring L-amino acids
RIITLYNSKDIKSTSMPISGGLDKEMWYXHSID

SEQ ID NO: 351 - protein, 109 aa, Homo sapiens
  misc_feature (2): Xaa equals any of the naturally occurring L-amino acids
  misc_feature (41): Xaa equals any of the naturally occurring L-amino acids
  misc_feature (106): Xaa equals any of the naturally occurring L-amino acids
GXGPLPATPWRTPSSPAPSLSLQPHSAMQGSVSSSLAAAQXTVPGRAADAQCLGAGDPGHSVQHRDLHPDRPQRRKLGLGWQRQRTGQGKAHFRPFGQRGGGRTKXRAG

SEQ ID NO: 352 - protein, 118 aa, Homo sapiens
  misc_feature (104): Xaa equals any of the naturally occurring L-amino acids
AEFACTLPAMGLWLSVFLSPEGEPQVPPQLLPGADHSLLTPQHPAMGWGAQGILPAGHPGLPLLPRSGSSFCPSTSQSAPSHKLAIQFRILPAGRATSVLTLPXMSQPWEEMTQAFPH

SEQ ID NO: 353 - protein, 36 aa, Homo sapiens
  misc_feature (29): Xaa equals any of the naturally occurring L-amino acids
IGRETLKFGQVHRRLRGCSLYRYSEVSAXLMSVFDP

SEQ ID NO: 354 - protein, 90 aa, Homo sapiens
  misc_feature (55): Xaa equals any of the naturally occurring L-amino acids
  misc_feature (70): Xaa equals any of the naturally occurring L-amino acids
  misc_feature (73): Xaa equals any of the naturally occurring L-amino acids
  misc_feature (78): Xaa equals any of the naturally occurring L-amino acids
  misc_feature (82): Xaa equals any of the naturally occurring L-amino acids
  misc_feature (89): Xaa equals any of the naturally occurring L-amino acids
LVMSSSPSLLSAETNKTAGPSPQPRRPAVPGQICSLGNVLGEFPSPSCAPSPSGXSQILVQKSSRGPGNXAKXSPADXPCPXRQGGKQXG

SEQ ID NO: 355 - protein, 100 aa, Homo sapiens
  misc_feature (36): Xaa equals any of the naturally occurring L-amino acids
HELRPKGEGAGLFRTPGLCTHGLYLPCSGEPQTCFXFFLSLSSLLTPWMLRAGPSSALSTTFGPCWHRAGASWAMVATLPGLTELPDSQRKGQEGRKETC

SEQ ID NO: 356 - protein, 106 aa, Homo sapiens
ETCVCACTRFNVPYRIFYKGMKIMANQKLVSVWGLNAAGVPDKQISRALPAVAQVSPNDKWLIKTLLQALDGESCRAVSSAAIKAGPQDLTVYSQGIVNNMGYGYR

SEQ ID NO: 357 - protein, 70 aa, Homo sapiens
  misc_feature (66): Xaa equals any of the naturally occurring L-amino acids
GDNTPTPASSLKAPLPLPAISAVSRAKYLWLGIKPSGFETCFCHCLLCDLEQVAFWSMDLRSVEWXLGFG

SEQ ID NO: 358 - protein, 103 aa, Homo sapiens
  misc_feature (30): Xaa equals any of the naturally occurring L-amino acids
AQPEVMYNSCFQRCRGSKIRVMPYLTMGIXSEKHAGDFIVNVSLLHTWVKGRACSIAPRLLTCTACYYTECNRSSNSGICVSVHRKGTVKIRCSHTLSYMQYT

SEQ ID NO: 359 - protein, 79 aa, Homo sapiens
PGELSDTFLISVPDVIDGILPKKKQARLTQPPLLRTLRHPKITLGHLRVQIFDAVFCSFHPSSGHAASVGVEEHLLFWV

SEQ ID NO: 360 - protein, 77 aa, Homo sapiens
  misc_feature (29): Xaa equals any of the naturally occurring L-amino acids
  misc_feature (37): Xaa equals any of the naturally occurring L-amino acids
  misc_feature (66): Xaa equals any of the naturally occurring L-amino acids
  misc_feature (72): Xaa equals any of the naturally occurring L-amino acids
ERQKRRSSWTLEKSSLTSEGQLDSGTLEXEFDQGWPXSRGRPPSHSIPFPALHSIEIHFHSALNPXGFTIFXSLCGP

SEQ ID NO: 361 - protein, 127 aa, Homo sapiens
  misc_feature (107): Xaa equals any of the naturally occurring L-amino acids
  misc_feature (118): Xaa equals any of the naturally occurring L-amino acids
KLGAEAFLVNMEEKRRRARVQGAWAAPVKSQAIAQPATTAKSHLHQKPGQTWKNKEHHLSDREFVFKEPQQVVRRAPEPRVIDREGVYEISLSPTGVSRVCLYPGFXDVKEADWILEXLCQDVPGNR

SEQ ID NO: 362 - protein, 99 aa, Homo sapiens
  misc_feature (95): Xaa equals any of the naturally occurring L-amino acids
AEGRGRGVMMSPKGTSLIAQGGRFHSSRFLGVLLSQSALQYYPFTSGHCVAPCKGSYAFTLARLEPLKRGYEAGLIFCIFQMKKQRLEVSYLGQXHVSS

SEQ ID NO: 363 - protein, 67 aa, Homo sapiens
  misc_feature (5): Xaa equals any of the naturally occurring L-amino acids
  misc_feature (12): Xaa equals any of the naturally occurring L-amino acids
  misc_feature (27): Xaa equals any of the naturally occurring L-amino acids
  misc_feature (35): Xaa equals any of the naturally occurring L-amino acids
APRPXPFDPWGXAGGRERQGCCIRAHXGAPPLNHXLPAVPQAGGKQVFDLSPLELGYVRGVCVCVRV

SEQ ID NO: 364 - protein, 85 aa, Homo sapiens
VLAICFKSYHVIPCPLGLCICDRGGHGRMKHVWPFLYYSDLRANKYIGTFLKGGLCLGEVECEGARALVGLAGTPGKKCSKDTIV

SEQ ID NO: 365 - protein, 87 aa, Homo sapiens
GRAGVRDPRPQAHVLASVPGAALSSHTPLLHGSGTGLEPGHGRGPQSLLHLSSRLNGALARSRILLTVPPDDEVPSLGRLWEAWSAV

SEQ ID NO: 366 - protein, 73 aa, Homo sapiens
  misc_feature (25): Xaa equals any of the naturally occurring L-amino acids
  misc_feature (26): Xaa equals any of the naturally occurring L-amino acids
  misc_feature (27): Xaa equals any of the naturally occurring L-amino acids
  misc_feature (38): Xaa equals any of the naturally occurring L-amino acids
  misc_feature (52): Xaa equals any of the naturally occurring L-amino acids
GRGLFSENNSALQVLSVRILGQGKXXXFQGIKNIHRSXHCREDRGVRWLQGXVNNKWRVRNVGLYIGNLCSSN

SEQ ID NO: 367 - protein, 64 aa, Homo sapiens
  misc_feature (41): Xaa equals any of the naturally occurring L-amino acids
AEAIYTRVIPTTSFNERIESDGEWITLCSVPSPKQMLIKWXNQTSSGCYWMSSLGTVWTFLDSC

SEQ ID NO: 368 - protein, 75 aa, Homo sapiens
  misc_feature (25): Xaa equals any of the naturally occurring L-amino acids
  misc_feature (47): Xaa equals any of the naturally occurring L-amino acids
KKPYESSEWGNPLAANLTSSTRRVXLKKGLNVKECAIPLISIIALEXTVVAISVNLNFEHPQWGILHKFQVCGKL

SEQ ID NO: 369 - protein, 74 aa, Homo sapiens
EKSIRRILLKKLLLWATALSPAGTLSEPMKHTLELSHAGSRKLGCLSPNYCPLLLEGFTWRITSLALQPIPYSG

SEQ ID NO: 370 - protein, 87 aa, Homo sapiens
  misc_feature (4): Xaa equals any of the naturally occurring L-amino acids
TARXEVHLNSPFPHVLPYLFVELAMLSHKHFLNLSFHFHLLLSCLSFSWVVIILVAFSAVCLAPSSSHLKAVLHTDQFLQNANVIMS

SEQ ID NO: 371 - protein, 62 aa, Homo sapiens
  misc_feature (24): Xaa equals any of the naturally occurring L-amino acids
DWPCVCHTCHCLSLSRGGPISPSXAAQQSKQLVGRGGKHGAGAGGGGRTGGRGRIQALLGCL

SEQ ID NO: 372 - protein, 85 aa, Homo sapiens
  misc_feature (62): Xaa equals any of the naturally occurring L-amino acids
  misc_feature (85): Xaa equals any of the naturally occurring L-amino acids
KPSDLFILESHYQKPFPASQLAGITGHAPSWLAEFCIFSRDRVSPCWSGWSGNSRPQVDLPXSASQSGWGFTSVGHPRPGIYFVX

SEQ ID NO: 373 - protein, 64 aa, Homo sapiens
  misc_feature (58): Xaa equals any of the naturally occurring L-amino acids
ANITVPTRISLSPLLVPKDMRDGQQKPHWRVQLCLKGRSWFIYGVAGRGEEEDRVTLXELSWVV

SEQ ID NO: 374 - protein, 41 aa, Homo sapiens
  misc_feature (40): Xaa equals any of the naturally occurring L-amino acids
MAEGKPALIRTRKTLHKINRRWNRLNLYMLLPFLPPFCVXF

SEQ ID NO: 375 - protein, 67 aa, Homo sapiens
  misc_feature (23): Xaa equals any of the naturally occurring L-amino acids
  misc_feature (31): Xaa equals any of the naturally occurring L-amino acids
  misc_feature (33): Xaa equals any of the naturally occurring L-amino acids
  misc_feature (34): Xaa equals any of the naturally occurring L-amino acids
  misc_feature (38): Xaa equals any of the naturally occurring L-amino acids
  misc_feature (40): Xaa equals any of the naturally occurring L-amino acids
APYSTQDSPYDKILSSPKCPQCXRLRKPLLXRXXLPSXSXLFPSPTKGFTCYLRKFQFGFFWNLIWV

SEQ ID NO: 376 - protein, 98 aa, Homo sapiens
  misc_feature (67): Xaa equals any of the naturally occurring L-amino acids
  misc_feature (88): Xaa equals any of the naturally occurring L-amino acids
AWLSSSPPPSSTWLLTPQSLEDLEDQKRKKKKEKMGFGSISRVFARGKQRKSLDPGLFDGTALIITXRRTRTGDTRSPAPAAASVSVXVACVQAKRGC

SEQ ID NO: 377 - protein, 105 aa, Homo sapiens
  misc_feature (54): Xaa equals any of the naturally occurring L-amino acids
  misc_feature (59): Xaa equals any of the naturally occurring L-amino acids
  misc_feature (99): Xaa equals any of the naturally occurring L-amino acids
  misc_feature (102): Xaa equals any of the naturally occurring L-amino acids
RSQSFGFQEKRRRVIEEGRAQVGVRSKQSLSPLLKKKKKQQKPLRLVLFCLLVXGVFIXIFFSRQANKRCLKSLVIPFNTPIDGAFLVKLRGKRLYPAXRLXTCA

SEQ ID NO: 378 - protein, 61 aa, Homo sapiens
  misc_feature (55): Xaa equals any of the naturally occurring L-amino acids
RHRTIASVQFSLMLSLCNHIHLSALPLLSWQPLLCSLSLMLLKECYKLNHRVCDXFLFETE

SEQ ID NO: 379 - protein, 60 aa, Homo sapiens
  misc_feature (14): Xaa equals any of the naturally occurring L-amino acids
  misc_feature (36): Xaa equals any of the naturally occurring L-amino acids
  misc_feature (46): Xaa equals any of the naturally occurring L-amino acids
  misc_feature (48): Xaa equals any of the naturally occurring L-amino acids
MGLLHHFLLMSVAXKSESITSKTGTEHCKSSFPTSXGNNQQTKLLXPXVWAHAMGFFLSF

SEQ ID NO: 380 - protein, 73 aa, Homo sapiens
  misc_feature (48): Xaa equals any of the naturally occurring L-amino acids
  misc_feature (71): Xaa equals any of the naturally occurring L-amino acids
YSLFKKKKNPRVVELPSGESLVGVRWCLGMSRTLCPPRVNFYFLTAIXMDLPVRSGAVCWGLQRPCLGMAXGH

SEQ ID NO: 381 - protein, 95 aa, Homo sapiens
  misc_feature (83): Xaa equals any of the naturally occurring L-amino acids
GTLRGPHGCHNGSNVCGWLILHPCSWPHGISRGSGGQGTHSQKAQPGVSETEEVALQPLLTPKDEVQLKTTYSKIQRAAQELXLSLPWPRPATSQ

SEQ ID NO: 382 - protein, 76 aa, Homo sapiens
GLGDLGEAAWNSGKSISPRIEDQLQMPAPALSSDVQAADELSEHQCFLISKVILIIAVLPISQGIYDIQNPYGEIL

SEQ ID NO: 383 - protein, 117 aa, Homo sapiens
NDPAAALAARPPGRGPAPPAGRLGGDLGPGRQAASCVSIPACLSAISPQGASAQAVSVWGEHGHPPSFFPTTEETSDSRKGTRFLPLLQSRHLGTKTFPQQRTLSPTEFWDGRGGSM

SEQ ID NO: 384 - protein, 99 aa, Homo sapiens
  misc_feature (68): Xaa equals any of the naturally occurring L-amino acids
  misc_feature (76): Xaa equals any of the naturally occurring L-amino acids
  misc_feature (77): Xaa equals any of the naturally occurring L-amino acids
  misc_feature (81): Xaa equals any of the naturally occurring L-amino acids
  misc_feature (84): Xaa equals any of the naturally occurring L-amino acids
  misc_feature (86): Xaa equals any of the naturally occurring L-amino acids
  misc_feature (92): Xaa equals any of the naturally occurring L-amino acids
  misc_feature (93): Xaa equals any of the naturally occurring L-amino acids
KDTNGEVLWVWCYPSTTATLRNLLLRKCCLTDENKLLHPFVFGQYRRTWFYITTIEVPDSSILKKVTXFSIGLTAXXFNPXKYXAXLGYWVXXPETWDP

SEQ ID NO: 385 - protein, 65 aa, Homo sapiens
  misc_feature (44): Xaa equals any of the naturally occurring L-amino acids
AGALEGGAARLRAPGASSLWYELNRRVSPPSDLQEGVCSIRPGXSKAFYPKLQHLAQGWAVLCPQ

SEQ ID NO: 386 - protein, 92 aa, Homo sapiens
VVWWADGAHPQKRTLICESRGKRHITNVPKNRASLLPCYKSMLAPERQHLISEPQDLNGAFRLHDQYQMFVKYTYAFMWLFIHSANRMNTLC

SEQ ID NO: 387 - protein, 93 aa, Homo sapiens
KKSHYHLSQDVGTSFVLPGSWTWCFAWTVFDATLCSASQASSLPTHSAYWQPSCPFSWCPCYCPHYNQPCEQPQYHHDHQYLVNPTVTVISSH

SEQ ID NO: 388 - protein, 103 aa, Homo sapiens
ASLEAHCQEGMRLLALENQRGDLLLCLSLAVNFPARAPRGTLRTQRTQRLPSSKFPADPGHPLKEGARGCHKAHLITPSKDTWWESLVRFGGRLPLLTKPIPS

SEQ ID NO: 389 - protein, 50 aa, Homo sapiens
  misc_feature (44): Xaa equals any of the naturally occurring L-amino acids
  misc_feature (45): Xaa equals any of the naturally occurring L-amino acids
DREELPLLPVFSGLQGQITVCNHTCPEGSTDLCSSSFFPTTCTXXVTVYP

SEQ ID NO: 390 - protein, 142 aa, Homo sapiens
  misc_feature (130): Xaa equals any of the naturally occurring L-amino acids
  misc_feature (140): Xaa equals any of the naturally occurring L-amino acids
ADLRRLGCAGAERLQPRLGLCEQQEHSSKVMIKLSAWQGHGLRAQKVSPIHTSARLRWPGLVWEGRAPVCSHSQQPPTYTRVFGSISGPKTLLPALPGLCPHPWHHALQVFWTGLEYTCRLLGHTTVAVXIGVGTETFFXAS

SEQ ID NO: 391 - protein, 111 aa, Homo sapiens
RAGVAARGRSGRRRSLGRELAPGTPSDCGVSLSVLLSGCPPRSLVVSVGAQALKNLLVAGPRAQERCQRAGASPEPREEGCNGSPIVDRDIRIPSPGSLKTSPEFGSWKEL

SEQ ID NO: 392 - protein, 91 aa, Homo sapiens
PRDPTRPWALGHFNPILIHRIRSLIFTFISNTKLSAAQPEFIPLHKCLMNCADRGRGEGREDVCLPGPRAGLSKEGLTELQSLKCFLRNEN

SEQ ID NO: 393 - protein, 43 aa, Homo sapiens
  misc_feature (31): Xaa equals any of the naturally occurring L-amino acids
ARPALLRGFGCPQPLPTCESHPPEWVGVSLXVVCMSLTLAMSG

SEQ ID NO: 394 - protein, 117 aa, Homo sapiens
  misc_feature (104): Xaa equals any of the naturally occurring L-amino acids
  misc_feature (112): Xaa equals any of the naturally occurring L-amino acids
  misc_feature (116): Xaa equals any of the naturally occurring L-amino acids
GGATQVELGPVAPGRSQLWPTRPSGNCFSAQDTKARSWGFPGSSSRGSGQQVWGWRSWEAMSPSRPCFLLCRREWETRLQETLGPHYVLLSSAAHGVLYMSLFXSQGTSSWXCLKXG

SEQ ID NO: 395 - protein, 149 aa, Homo sapiens
  misc_feature (133): Xaa equals any of the naturally occurring L-amino acids
  misc_feature (134): Xaa equals any of the naturally occurring L-amino acids
GCPGLVQRAASSPGSQAPDTALRAMADRGPWRVGVVGYGRLGQSLVSRLLAQGPELGLELVFVWNRDPGRMAGSVPPSLQLQNLAALGERRPDLVVEVAHPKIIHESGAQILRHANLLVGSPSALSDQTTERXXWRPHSTGTTPCLWPE

SEQ ID NO: 396 - protein, 98 aa, Homo sapiens
DSGGKRLSSTPLEILFFLNGWYNATYFLLELFIFLYKGVLLPYPTANLVLDVVMLLLYLGIEVIRLFFGKADHLEMTPWAVSDRYKGKPLPAKDATQY

SEQ ID NO: 397 - protein, 73 aa, Homo sapiens
  misc_feature (47): Xaa equals any of the naturally occurring L-amino acids
  misc_feature (48): Xaa equals any of the naturally occurring L-amino acids
  misc_feature (57): Xaa equals any of the naturally occurring L-amino acids
PNQFTISRRGGKASDVALPRGSSPSVLAVSVPAPTNVLSLSVCSMPXXSCQGEKPAXPFPRGELESPKPLVTP

SEQ ID NO: 398 - protein, 41 aa, Homo sapiens
YNANAVSTVVLYCLGNNGKKKCGPVQYRCNFFPKYFQWVVG

SEQ ID NO: 399 - protein, 142 aa, Homo sapiens
  misc_feature (123): Xaa equals any of the naturally occurring L-amino acids
  misc_feature (132): Xaa equals any of the naturally occurring L-amino acids
  misc_feature (141): Xaa equals any of the naturally occurring L-amino acids
  misc_feature (142): Xaa equals any of the naturally occurring L-amino acids
ARAGAERSRAEAHPQPTREPLPRREVLRVRPAFCTPGEYLIHQGDALQALYFVCSGSMEVLKGGTVLAILGKGDLIGCELPRREQVVKANADVKGLTYCVLQCLQLAGLHDSLALYPEFAPRXIVASEGSSXTTWVLGRLXX

SEQ ID NO: 400 - protein, 57 aa, Homo sapiens
GLGRMAGRDARQPPLCRATASQVCAWVSVSGARAPPPPPTYRGFPLGNGAAPGAPER

SEQ ID NO: 401 - protein, 80 aa, Homo sapiens
  misc_feature (41): Xaa equals any of the naturally occurring L-amino acids
  misc_feature (60): Xaa equals any of the naturally occurring L-amino acids
CFVHPMAVFEMWGLPYSHCKHCWGMAAGVTCCHLNAMGGDXHVVKRGLFCSGSTLRSPVXEELVLVLMPPGLVPCGSRCH

SEQ ID NO: 402 - protein, 54 aa, Homo sapiens
  misc_feature (26): Xaa equals any of the naturally occurring L-amino acids
  misc_feature (38): Xaa equals any of the naturally occurring L-amino acids
  misc_feature (41): Xaa equals any of the naturally occurring L-amino acids
  misc_feature (44): Xaa equals any of the naturally occurring L-amino acids
VQLLNAILLLAGPHQTGAGKGKEMEXWLHSYSSAKLSXGEXMRXEPSGVKHTYG

SEQ ID NO: 403 - protein, 81 aa, Homo sapiens
  misc_feature (44): Xaa equals any of the naturally occurring L-amino acids
  misc_feature (81): Xaa equals any of the naturally occurring L-amino acids
GCIGQCSTEEISSLHSPQSLITVDRYFSWGENEKGTFITMLVFXLLFFFEVESCSVAQACNGAILAHCNLRSRVQAILLSX

SEQ ID NO: 404 - protein, 44 aa, Homo sapiens
SQHFGRPRQVDHLRSGVQDQPGQHSETLSLLKYKKLAGRGGARL

SEQ ID NO: 405 - protein, 71 aa, Homo sapiens
  misc_feature (1): Xaa equals any of the naturally occurring L-amino acids
  misc_feature (2): Xaa equals any of the naturally occurring L-amino acids
  misc_feature (5): Xaa equals any of the naturally occurring L-amino acids
XXSLXEGTLLLEKVWLSELGTVRRALWVCTKGNQIACLSLEVPCSVWDLKRVSYHLEEGNSGRQQRNRLDS

SEQ ID NO: 406 - protein, 51 aa, Homo sapiens
FHWTEERRYRNEGPWGRGEPEVMESRQEARCNLQITIFLRVGPFLFLPVRI

SEQ ID NO: 407 - protein, 69 aa, Homo sapiens
SRIKSNLLNPLILTLRTLHNLLLNDYFSPYLSLLFTSVLRFLLGLPTYSVLGFCMSHSACLGQFHTICK

SEQ ID NO: 408 - protein, 31 aa, Homo sapiens
KLSGRETAFCVLTSPPGHSDAPPTPGKTEKH

SEQ ID NO: 409 - protein, 80 aa, Homo sapiens
  misc_feature (1): Xaa equals any of the naturally occurring L-amino acids
  misc_feature (76): Xaa equals any of the naturally occurring L-amino acids
XSGSSQPVGECWKRRIYTDDVHSVCHLGLGGLTARSQTVILTGFTPGTPSILCCATTLHSLSLAPLWGSLAQPQKXEADS

SEQ ID NO: 410 - protein, 79 aa, Homo sapiens
  misc_feature (78): Xaa equals any of the naturally occurring L-amino acids
  misc_feature (79): Xaa equals any of the naturally occurring L-amino acids
AHSCLWGFSSQMMPVAPERSPEVGTAGWSLSCDFSAQPAGPVSNERGLLPLPPTPWPSASLGRSMRVPGEIDTHSALXX

SEQ ID NO: 411 - protein, 86 aa, Homo sapiens
  misc_feature (57): Xaa equals any of the naturally occurring L-amino acids
  misc_feature (60): Xaa equals any of the naturally occurring L-amino acids
  misc_feature (66): Xaa equals any of the naturally occurring L-amino acids
EASSDRMRPCLKKTKKEKKRYLISSNIQDLNEKNVILGQVYIKSIQQFHSYLSSWTXSLXGYLWHXSYHTEGWYLLAFTSSWSFTH

SEQ ID NO: 412 - protein, 58 aa, Homo sapiens
WFFCWSYSCSCSQLAVQLGLDSLVGFIYILQVAGNCLGSLDSPPPGLSSWLDTIHIVV

SEQ ID NO: 413 - protein, 93 aa, Homo sapiens
TKEKTNNKLGKIFTTHHKWLILLMLIFKKKYKSGQAQWLMPVIPVLWEAEVRGSPEVRSSKPAWPTRRNLSPLKIQKVAGRGVGTCNPNYSGG

SEQ ID NO: 414 - protein, 204 aa, Homo sapiens
  misc_feature (176): Xaa equals any of the naturally occurring L-amino acids
REQKLELHRGGGRSRTSGSPGLQEFGTSRIEPGSSSPRLVSSKEDLAGPSAGSGSARFSRRPTCPDTSVAGSLPTPPVPRHRKSHSLGNNRGRLYATLGPNWRVPVRNSPRTRSCVYSPTGPCICSLGNSAAVPTMEGPLRRKTLLKEGRKPALSSWTRYWVILSGSTLLYYGAKXLRGTDRKHYKSTPGKKGSIVGWMVQTAR

SEQ ID NO: 415 - protein, 55 aa, Homo sapiens
  misc_feature (39): Xaa equals any of the naturally occurring L-amino acids
  misc_feature (51): Xaa equals any of the naturally occurring L-amino acids
LGAPPFQQFPFCLMSVNITHIAIQALREECLSRECNRQXKVIPVVNSFYAXTFLH

SEQ ID NO: 416 - protein, 58 aa, Homo sapiens
LQEMFPSTTHIGQSSSRPRSRKLLLQCRSDLLEDCLTSGSHSFIGEYGMISFHGLTPS

SEQ ID NO: 417 - protein, 52 aa, Homo sapiens
FPCLYFNNCNFYCLFRISNSMCPSLPALTVSHFLIMCSLITEHFLRIFICKN

SEQ ID NO: 418 - protein, 95 aa, Homo sapiens
  misc_feature (80): Xaa equals any of the naturally occurring L-amino acids
  misc_feature (83): Xaa equals any of the naturally occurring L-amino acids
  misc_feature (84): Xaa equals any of the naturally occurring L-amino acids
  misc_feature (95): Xaa equals any of the naturally occurring L-amino acids
GSVAPPAAWQGREWRRPACPPQQTRVPSSRCTVGDVSFKTTPPDRETLPAVSKPWRRAAGHLLAALQSQGSWDSGHGGGXWPXXGGPGYPIPAYX

SEQ ID NO: 419 - protein, 102 aa, Homo sapiens
  misc_feature (100): Xaa equals any of the naturally occurring L-amino acids
  misc_feature (101): Xaa equals any of the naturally occurring L-amino acids
KLYDSLLALDGHIQSARALMVVAVLLGFVAMVLSVVGMKCTRVGDSNPIAKGRVAIAGGALFILAGLCTLTAVSWYATLVTHEFFNPSTPVNARYEFGPXXV

SEQ ID NO: 420 - protein, 69 aa, Homo sapiens
GCCLWGCKSQSALDFGLVPGRRRQEGGVARGQGFCIISPELGLSRQWERQEQTRGQQLRSSLIVSFQSF

SEQ ID NO: 421 - protein, 134 aa, Homo sapiens
  misc_feature (119): Xaa equals any of the naturally occurring L-amino acids
  misc_feature (133): Xaa equals any of the naturally occurring L-amino acids
ASCWLGHRCLPCPRARGLPSCAATPEELYLGCLCPHGPPPVWGYTRLCCRALWVDGETPCVSLTRAGAPHRACRGRRFHWRGKSLGGPRLPPGGPGDAVSIIQAQSDLICSQPGQMWAXVRLPSIYHPTKGAXV

SEQ ID NO: 422 - protein, 110 aa, Homo sapiens
  misc_feature (31): Xaa equals any of the naturally occurring L-amino acids
  misc_feature (63): Xaa equals any of the naturally occurring L-amino acids
  misc_feature (109): Xaa equals any of the naturally occurring L-amino acids
  misc_feature (110): Xaa equals any of the naturally occurring L-amino acids
TGRNSGSTHASGTPKGNPGVGLRDWFFEVLXFFHDSDQLSLGHFWSITDSILVKMCSTQTTVXSFPYFIFSYLPSPNCVTRGSHSKNGKSRSVKDSTKKKKKKKKKKKXX

SEQ ID NO: 423 - protein, 66 aa, Homo sapiens
  misc_feature (63): Xaa equals any of the naturally occurring L-amino acids
KIMLSFSRVLKKIVCFDIHLEFIVTPRLAFFVYAGWQGRGDTIFFPCKFLMVAFLFIGPSWEXRWP

SEQ ID NO: 424 - protein, 87 aa, Homo sapiens
  misc_feature (76): Xaa equals any of the naturally occurring L-amino acids
KHSPASPSFILLALTQNGVALVHTSLTAGLKDNMGQVWWLMPVIPTLWRLRWADHLRPGVGDQAGQHGETSSLLKXQKLSRHGGARL

SEQ ID NO: 425 - protein, 15 aa, Homo sapiens
CKSYLGDTIVSRIIS

SEQ ID NO: 426 - protein, 46 aa, Homo sapiens
KMIVPRVAVPLETLGLGCDLPKNKLNSLIFLFRKILTSNFITRSHY

SEQ ID NO: 427 - protein, 63 aa, Homo sapiens
  misc_feature (6): Xaa equals any of the naturally occurring L-amino acids
PPTRPXTVPIRLRESICVYCGLLLQLSPRFIEDRSYVCFIVSSLACSNFSKEGRKHFYLTIKV

SEQ ID NO: 428 - protein, 60 aa, Homo sapiens
NLNSLKVIIFWYLNSHKLSQKYPPFFLSLETTLTSPNQLCYLPPSRRQVIPAAVPPGAVQ

SEQ ID NO: 429 - protein, 53 aa, Homo sapiens
  misc_feature (31): Xaa equals any of the naturally occurring L-amino acids
  misc_feature (42): Xaa equals any of the naturally occurring L-amino acids
  misc_feature (50): Xaa equals any of the naturally occurring L-amino acids
GFVLSIKMSTCPPTATVEKGPRSEAQQSPSXADMGQASGELXGCPVKMCXSLW

SEQ ID NO: 430 - protein, 24 aa, Homo sapiens
  misc_feature (6): Xaa equals any of the naturally occurring L-amino acids
SRNHFXIGIWMRQILHEFIMLSKI

SEQ ID NO: 431 - protein, 86 aa, Homo sapiens
ARGHLCDPGPCRGRLAPFRAMSRSSRSPRCPPQPARSPDPESRRHSVADPPPPGGRRQSLPSGALIRGPLPGSEALGSGRTRRIGL

SEQ ID NO: 432 - protein, 91 aa, Homo sapiens
  misc_feature (58): Xaa equals any of the naturally occurring L-amino acids
GTRHAHGPCAACGPGQHGEATRGHSCTRGCPELHCTQPAGNKNCNCIRERHLIQELRXRISSSQYLLHQLQSGCVPHLRIQRPRHSAYFCS

SEQ ID NO: 433 - protein, 117 aa, Homo sapiens
  misc_feature (15): Xaa equals any of the naturally occurring L-amino acids
RNCQDSPRPVRPVVXLDRPPIGPWSAEGATLLSNSAHSTNTRPHPAGQLQLAVLIHTPPIGWKYSSGFVTADMIKEHLPPPAKSTLILVCGPPPLIQTAAHPNLEKLGYTQDMIFTY

SEQ ID NO: 434 - protein, 76 aa, Homo sapiens
  misc_feature (48): Xaa equals any of the naturally occurring L-amino acids
KCTSFFLLLKYHILPPTTTCVLKYNVWPLGKFLLLKSIGRGTWAPRLXIPALGDAEAVGSPEVQEFRGQPGPTWGK

SEQ ID NO: 435 - protein, 116 aa, Homo sapiens
  misc_feature (110): Xaa equals any of the naturally occurring L-amino acids
HEGRGPDLGVTASLMWVPGPTVGCPGLCLLDRPPHHPTLLSLLPQPLSSFVSSPGVGLTACPLTVEFGRVSQKFPNTNWRFRGTVEAKATPQNPRRRFRPRSREGKPISXSNCGEI

SEQ ID NO: 436 - protein, 38 aa, Homo sapiens
TREYIKNYHFMSIQHTELLIRYFTIFYSLQNPVCLLHL

SEQ ID NO: 437 - protein, 66 aa, Homo sapiens
  misc_feature (24): Xaa equals any of the naturally occurring L-amino acids
  misc_feature (33): Xaa equals any of the naturally occurring L-amino acids
  misc_feature (34): Xaa equals any of the naturally occurring L-amino acids
  misc_feature (35): Xaa equals any of the naturally occurring L-amino acids
  misc_feature (36): Xaa equals any of the naturally occurring L-amino acids
HSAIFKCKSCSTRKETCLQFKTMXVSTHDLVYXXXXKRGFCKHCRIVSYSFFYRNVIPMVHFLFNK

SEQ ID NO: 438 - protein, 39 aa, Homo sapiens
  misc_feature (19): Xaa equals any of the naturally occurring L-amino acids
  misc_feature (26): Xaa equals any of the naturally occurring L-amino acids
NFFGSFTANCLIVRRHENXDSPVTHXQPKEGIAAGAYGT

SEQ ID NO: 439 - protein, 142 aa, Homo sapiens
  misc_feature (95): Xaa equals any of the naturally occurring L-amino acids
  misc_feature (125): Xaa equals any of the naturally occurring L-amino acids
  misc_feature (134): Xaa equals any of the naturally occurring L-amino acids
  misc_feature (141): Xaa equals any of the naturally occurring L-amino acids
PLTPNPDPNQTANSPELHDCCDQGGSPLKNSLFAWAYPSLMGKLRPREAHGWCRPDGDLRPLVSEKARVEVIAGTVPRPWKCNPSCTCDPPASAXSWVLGTRDICSCDLNTLNKPVLQVGKLKLXSCEGLPWVXGDGSRTXN

SEQ ID NO: 440 - protein, 28 aa, Homo sapiens
IPVTPVAIFKDYFLNFSSSSSTSSSSSF

SEQ ID NO: 441 - protein, 40 aa, Homo sapiens
GTRRKASLTRKKPRPSSAFIAACKNGKRSRSLSTVSENII

SEQ ID NO: 442 - protein, 197 aa, Homo sapiens
  misc_feature (3): Xaa equals any of the naturally occurring L-amino acids
  misc_feature (16): Xaa equals any of the naturally occurring L-amino acids
  misc_feature (80): Xaa equals any of the naturally occurring L-amino acids
  misc_feature (99): Xaa equals any of the naturally occurring L-amino acids
  misc_feature (136): Xaa equals any of the naturally occurring L-amino acids
  misc_feature (149): Xaa equals any of the naturally occurring L-amino acids
  misc_feature (163): Xaa equals any of the naturally occurring L-amino acids
  misc_feature (168): Xaa equals any of the naturally occurring L-amino acids
GRXSPTQDPGAPGLLXSRRSSRGDVTVLSAWHTALRPPNARGRASLPRVPASWASQSRSWEGEQHAAARDPHLHSPRGGXLPRGSAAWPGPRTFVSALXSSDLGAATGFSFWGSPQGPCLPSICSTLILQPCATLXPLLLQPQVPKVSXQALVSAHSEWQRKXEAAEXLLTLRNSAQAPPDSISLHQPCNPPAPAGG

SEQ ID NO: 443 - protein, 98 aa, Homo sapiens
  misc_feature (3): Xaa equals any of the naturally occurring L-amino acids
  misc_feature (4): Xaa equals any of the naturally occurring L-amino acids
  misc_feature (89): Xaa equals any of the naturally occurring L-amino acids
LTXXEKNILTCFFLISKYLNEPNYEALISIQIGIMEQTIAVLDKMHKKNVENCKKLLKKLGKFSNQKDIANYALSCNLREELVAVSERXDICNAWGLN

SEQ ID NO: 444 - protein, 49 aa, Homo sapiens
  misc_feature (4): Xaa equals any of the naturally occurring L-amino acids
SSPXHRQEEGVPHLVPCCVLLEASDLGLNPNDLTKVNFVFCAWISLSVK

SEQ ID NO: 445 - protein, 111 aa, Homo sapiens
  misc_feature (108): Xaa equals any of the naturally occurring L-amino acids
EGDGVGQEEAGLGRREAEGGRLGRGGRRRIQPAPGPQLGRREDHAAAQEAQTLELGAGQPVRRRRGGRLVRTRGVGANLFLQNPGAAPGGRESLCIINKLFNGKKKKXKKK

SEQ ID NO: 446 - protein, 95 aa, Homo sapiens
FFKKHNIAVYSPLSPLLLPSSEVMLSSKCIPQGACSLIGQRLSKLLPPFIYLFVCLFETESRSITQAGVQWCNLGSLQLPPPGFKGFSCFSLPSS

SEQ ID NO: 447 - protein, 56 aa, Homo sapiens
SKCREGAITSAEGGERKPAREQTMRCSRTPCLPRLCTRPARLHLQGPRGLPETLLE

SEQ ID NO: 448 - protein, 30 aa, Homo sapiens
PSFQLSYVLCSPFIRRDELYNNIHFHKLFR

SEQ ID NO: 449 - protein, 29 aa, Homo sapiens
ARGLSTVVSTPRKSSALLRSCTLQKKKKT

SEQ ID NO: 450 - protein, 70 aa, Homo sapiens
  misc_feature (40): Xaa equals any of the naturally occurring L-amino acids
  misc_feature (59): Xaa equals any of the naturally occurring L-amino acids
  misc_feature (64): Xaa equals any of the naturally occurring L-amino acids
SICAINCKKKMDICPLQFEEMIDRLEKGSGQQPVSLQEAXLLLKEDDELIREVYEYWIXKRKNXPRPSPI

SEQ ID NO: 451 - protein, 42 aa, Homo sapiens
SAHLGLPKGWDYRRDTTPSQVTVLNYLLKLQNYLFLIYLCFI

SEQ ID NO: 452 - protein, 85 aa, Homo sapiens
  misc_feature (39): Xaa equals any of the naturally occurring L-amino acids
  misc_feature (55): Xaa equals any of the naturally occurring L-amino acids
  misc_feature (58): Xaa equals any of the naturally occurring L-amino acids
  misc_feature (71): Xaa equals any of the naturally occurring L-amino acids
  misc_feature (74): Xaa equals any of the naturally occurring L-amino acids
  misc_feature (83): Xaa equals any of the naturally occurring L-amino acids
VQPSCANFTRPNRNYYLIRRLVTVLLTPPTPCTTGLFCXAALYLVGDNNSCGMGXQIXEYCYYYIYRVLLXFNXTLVSLACYXFQ

SEQ ID NO: 453 - protein, 72 aa, Homo sapiens
  misc_feature (30): Xaa equals any of the naturally occurring L-amino acids
  misc_feature (35): Xaa equals any of the naturally occurring L-amino acids
ECEARRGSEKCPGRKEDRAEEARESGELTXRSREXRQECGLVVIEIVEGQECLPKFATGSLHLCFLMADLNT

SEQ ID NO: 454 - protein, 43 aa, Homo sapiens
  misc_feature (37): Xaa equals any of the naturally occurring L-amino acids
QQLKACHHQLLAIYFPPKLDRNVMVWGFHCVFKKVKXVTPFFK

SEQ ID NO: 455 - protein, 28 aa, Homo sapiens
LYFYSCVTSSKFFNFIGNSVFSAIKLRE

SEQ ID NO: 456 - protein, 88 aa, Homo sapiens
GDLQAGQKTLLNTADRQRSASEQAADAVRPKYKKKQLDAGVEGTSGDNEELWQQSECFRRQLKALVTNNCGEGRCFQSLNPTVGDGRE

SEQ ID NO: 457 - protein, 59 aa, Homo sapiens
  misc_feature (36): Xaa equals any of the naturally occurring L-amino acids
  misc_feature (56): Xaa equals any of the naturally occurring L-amino acids
HSSWNIEGTPSMLNFIINIVLSSPLESYFPSALIVXHFQSFFPLHIASLSQILLTXDFN

SEQ ID NO: 458 - protein, 59 aa, Homo sapiens
  misc_feature (25): Xaa equals any of the naturally occurring L-amino acids
  misc_feature (38): Xaa equals any of the naturally occurring L-amino acids
  misc_feature (50): Xaa equals any of the naturally occurring L-amino acids
  misc_feature (57): Xaa equals any of the naturally occurring L-amino acids
ILRGNVEILISRRCWCQKYGQKAGXDGPGAVASRLVIXQQLGKPKAGLGXMEVQEFXRP

SEQ ID NO: 459 - protein, 73 aa, Homo sapiens
  misc_feature (72): Xaa equals any of the naturally occurring L-amino acids
  misc_feature (73): Xaa equals any of the naturally occurring L-amino acids
EVSPELYSLSLKQIEKADFYRKLFPHPHVSKGRIMCTRLHLSFLLWVLLPQVRLFDLIHHSIYPEMLRLREXX

SEQ ID NO: 460 - protein, 56 aa, Homo sapiens
ETINMFSFSTDFAYSGHLKINEIIKCYLLWMASFTYVMFGEVHPCSKYQHLIPFYC

SEQ ID NO: 461 - protein, 20 aa, Homo sapiens
NLDVRLKTVVFNISLARTRG

SEQ ID NO: 462 - protein, 250 aa, Homo sapiens
  misc_feature (16): Xaa equals any of the naturally occurring L-amino acids
  misc_feature (17): Xaa equals any of the naturally occurring L-amino acids
  misc_feature (250): Xaa equals any of the naturally occurring L-amino acids
SGEETSDLHGCHLPVXXGPPRGSLPCSWEDCHSQELHPRLRHWFISLTRPLDSHLEHVDFSSLLHCLSFEQILQIFASAVLERKIIFLAEGLSTLSQCIHAAAALLYPFSWAHTYIPVVPESLLATVCCPTPFMVGVQMRFQQEVMDSPMEEVLLVNLCEGTFLMSVGDEKDILPPKLQDDILDSLGQGINELKTAEQINEHVSGPFVQFFVKIVGHYASYIKREANGQGHFQERSFCKALTSKTNRRFX

SEQ ID NO: 463 - protein, 104 aa, Homo sapiens
ARAEAQRQAKVRMIAAEAEKAASESLRMAAEILSGTPAAVQLRYLHTLQSLSTEKPSTVVLPLPFDLLNCLSSPSNRTQGSLPFPSPSKPVEPLNPKKKDSPML

SEQ ID NO: 464 - protein, 36 aa, Homo sapiens
  misc_feature (36): Xaa equals any of the naturally occurring L-amino acids
FHHVGRAGLELLTSNDLPASASQTAGITGVSHRTWX

SEQ ID NO: 465 - protein, 109 aa, Homo sapiens
  misc_feature (25): Xaa equals any of the naturally occurring L-amino acids
  misc_feature (98): Xaa equals any of the naturally occurring L-amino acids
  misc_feature (103): Xaa equals any of the naturally occurring L-amino acids
LYVTFPGANIHLKYIHAPGKSSQPXGPHRTGWDFPSRSWVTGLFGGLCLYVFIQIFSWAKKISKLSDFQDVHCTAEGHGFKPGQFTPPATQAFQAHAXGPAGXRCEIPG

SEQ ID NO: 466 - protein, 54 aa, Homo sapiens
RIRLCGLSHLMYNCNFCLFFFPCKSLRRPNGTRDKNPPPPPPKITTSPHRMKQM

SEQ ID NO: 467 - protein, 76 aa, Homo sapiens
  misc_feature (41): Xaa equals any of the naturally occurring L-amino acids
  misc_feature (56): Xaa equals any of the naturally occurring L-amino acids
  misc_feature (66): Xaa equals any of the naturally occurring L-amino acids
RNFMLPQFRKPVSSRRVNGRLQIMTAKQNFTMFLKLTKFDXIGFDFISEKSYTLKXIFNTYIRNLXNSAEKMLLVL

SEQ ID NO: 468 - protein, 53 aa, Homo sapiens
IVLFLQICSLILCFKAEMKYIMNFFKKTHQISGYHKTLLYYYTAHYLLYVIDV

SEQ ID NO: 469 - protein, 69 aa, Homo sapiens
  misc_feature (16): Xaa equals any of the naturally occurring L-amino acids
  misc_feature (43): Xaa equals any of the naturally occurring L-amino acids
  misc_feature (48): Xaa equals any of the naturally occurring L-amino acids
  misc_feature (49): Xaa equals any of the naturally occurring L-amino acids
  misc_feature (50): Xaa equals any of the naturally occurring L-amino acids
  misc_feature (51): Xaa equals any of the naturally occurring L-amino acids
  misc_feature (53): Xaa equals any of the naturally occurring L-amino acids
  misc_feature (59): Xaa equals any of the naturally occurring L-amino acids
  misc_feature (62): Xaa equals any of the naturally occurring L-amino acids
  misc_feature (67): Xaa equals any of the naturally occurring L-amino acids
  misc_feature (69): Xaa equals any of the naturally occurring L-amino acids
SSKEPVCLVFTMSTFXVSSKQENLKMYGVGGRLCYLIFPKDHXIRKSXXXXWXSTTFIXGLXVVLFXYX

SEQ ID NO: 470 - protein, 62 aa, Homo sapiens
  misc_feature (13): Xaa equals any of the naturally occurring L-amino acids
  misc_feature (17): Xaa equals any of the naturally occurring L-amino acids
  misc_feature (24): Xaa equals any of the naturally occurring L-amino acids
  misc_feature (35): Xaa equals any of the naturally occurring L-amino acids
TSVTGKIVSILGXAIVXWKWSQTXCGCVPIKLYLXEQVAGRIWLAGCGLQALTLTKCFISWV

SEQ ID NO: 471 - protein, 114 aa, Homo sapiens
  misc_feature (104): Xaa equals any of the naturally occurring L-amino acids
  misc_feature (110): Xaa equals any of the naturally occurring L-amino acids
  misc_feature (114): Xaa equals any of the naturally occurring L-amino acids
LFPSGDRLIQVMDILGQPSTCPLSSVIPIEIGPLTEEHVFFISPESPINLLVRDLLCNLIATIFCTVDGSVCGSLLGKRHLDLGYYILLERKEVWPEMGISYVXENPHKXKQVX

SEQ ID NO: 472 - protein, 26 aa, Homo sapiens
ENITCWETVSALMMLYRQEINSEEYA

SEQ ID NO: 473 - protein, 88 aa, Homo sapiens
LSGLKISVRSKSRRWNFTCRILICLLVPWSSPPCMTQMFTVSRLFFCRHMSELEVDLARAMKETSRIVLLFIFLRGSLAMSPRLECKA

SEQ ID NO: 474 - protein, 51 aa, Homo sapiens
  misc_feature (6): Xaa equals any of the naturally occurring L-amino acids
  misc_feature (13): Xaa equals any of the naturally occurring L-amino acids
  misc_feature (15): Xaa equals any of the naturally occurring L-amino acids
  misc_feature (22): Xaa equals any of the naturally occurring L-amino acids
  misc_feature (32): Xaa equals any of the naturally occurring L-amino acids
TFFLVXEDGILPXFXYLSFLPXFAMELLSMCXKLMTTHSLGYKHVLMEGTL

SEQ ID NO: 475 - protein, 94 aa, Homo sapiens
  misc_feature (93): Xaa equals any of the naturally occurring L-amino acids
DLFISQNMQGGTKLHGQLGHGDKASYRQPKHVEKLQGKAIHQVSCGDDFTVCVTGKPSAESVLSAFNVGVFCLMLCNLSWDFKTKDSIQRTRXP

SEQ ID NO: 476 - protein, 33 aa, Homo sapiens
IYTIYNINIILYIIYIIHKYNFIYNIHHDVYNI

SEQ ID NO: 477 - protein, 55 aa, Homo sapiens
SRANNNCISQLFTENINDFPKSAVSKQLGPDPEFLNNRSINSQMLTNRAMLAHNK

SEQ ID NO: 478 - protein, 57 aa, Homo sapiens
GGVCVLYKQYGKECWLKYKDLQMTLSGWALGCCGVVTTSKQREMFCYEFPVHGKLYG

SEQ ID NO: 479 - protein, 68 aa, Homo sapiens
  misc_feature (33): Xaa equals any of the naturally occurring L-amino acids
GRLKEDQKTRYQIRAAIVKLEKVTKWPCFSIRXVEDTRPLALGLSGGSLRKVHTLGPVESFAFIIVCI

SEQ ID NO: 480 - protein, 59 aa, Homo sapiens
EFAARNREARVPGMTPPLAVRIRCLFFSGLHFPQMTISGFQSYCSSAGKTNVTAFCEFW

SEQ ID NO: 481 - protein, 47 aa, Homo sapiens
VYKYVSLTFTNCTSNIIHYLNFRNMRKITHNSTHSNLCHEFQLINAF

SEQ ID NO: 482 - protein, 66 aa, Homo sapiens
VFSSAYKVFISKTVTSINHFLFQNILIFNIFVYPHSLVTIIARKPIDKLSKWAYHTPPKIDFCFFY

SEQ ID NO: 483 - protein, 65 aa, Homo sapiens
  misc_feature (53): Xaa equals any of the naturally occurring L-amino acids
  misc_feature (60): Xaa equals any of the naturally occurring L-amino acids
PDFRSVQKLPPKQLPVHLAQCVPRCLCTVFALLAANKAELPSLDNWKLLPWCXIVIVKSXNEQQH

SEQ ID NO: 484 - protein, 82 aa, Homo sapiens
  misc_feature (2): Xaa equals any of the naturally occurring L-amino acids
  misc_feature (27): Xaa equals any of the naturally occurring L-amino acids
  misc_feature (29): Xaa equals any of the naturally occurring L-amino acids
  misc_feature (30): Xaa equals any of the naturally occurring L-amino acids
KXDNPELIKPQKLINPVKTSRNHQDLXRXXLMNQKRTGLPLREADPLAGGHHCGGQQCFQTPAVTGSLLKWMCISKFGWKRL

SEQ ID NO: 485 - protein, 82 aa, Homo sapiens
ERLKRQRERAASASVLNNQRQIIRYSWAFCTCRLVRDDCRGQQTSCHKDNMEAGSQVLIPLGIHSEIAKEANKCLSGLSRHT

SEQ ID NO: 486 - protein, 59 aa, Homo sapiens
FQAFGTINLSFYLETFSSLGVLDSTLFRFFLSGCSFSCFFENNFITASQVCSLSVTSKQ

SEQ ID NO: 487 - protein, 76 aa, Homo sapiens
  misc_feature (9): Xaa equals any of the naturally occurring L-amino acids
  misc_feature (76): Xaa equals any of the naturally occurring L-amino acids
RNFVLAVGXNSITVLLAKLVYCPSVLYQFIYMLLKNVHFTFSLLKNVLFNSNVAIIKMDCLNGIEFLLYSPMKMPX

SEQ ID NO: 488 - protein, 43 aa, Homo sapiens
  misc_feature (25): Xaa equals any of the naturally occurring L-amino acids
EIMLKCILEIVLKVLMKPNFLYAFXDIKGIISCVTHLILIPCD

SEQ ID NO: 489 - protein, 71 aa, Homo sapiens
MPAWRKPWHGTDKQAPLAASQARLFILKTTGHQHHHLRTIFLKPKTLFQAGISSITNLVTLDGVKPEIKCF

SEQ ID NO: 490 - protein, 63 aa, Homo sapiens
  misc_feature (29): Xaa equals any of the naturally occurring L-amino acids
  misc_feature (47): Xaa equals any of the naturally occurring L-amino acids
PLATDVIFELCINSPTNALPWLEGQPGKXNMVKVATKDNSSKPHGYXSWYFHFGRAKLRLRGS

SEQ ID NO: 491 - protein, 36 aa, Homo sapiens
  misc_feature (8): Xaa equals any of the naturally occurring L-amino acids
  misc_feature (12): Xaa equals any of the naturally occurring L-amino acids
  misc_feature (17): Xaa equals any of the naturally occurring L-amino acids
  misc_feature (35): Xaa equals any of the naturally occurring L-amino acids
LKEKNWIXIQNXYLMEXEKNETKFSDSRGEIRMTXK

SEQ ID NO: 492 - protein, 52 aa, Homo sapiens
  misc_feature (44): Xaa equals any of the naturally occurring L-amino acids
  misc_feature (51): Xaa equals any of the naturally occurring L-amino acids
MNWFIHTMGIPFSNKKEQTVDTFNHLDEYQGNYCCPDKNQSLKXTYSMVPXG

SEQ ID NO: 493 - protein, 66 aa, Homo sapiens
  misc_feature (2): Xaa equals any of the naturally occurring L-amino acids
LXPLPTFCLPCGCCFYPPARELVFIFSIVLHTCAAATTISQGPMVGGREEKQKGLASSSYNDSSIE

SEQ ID NO: 494 - protein, 118 aa, Homo sapiens
PGLTVIEAPTGSGKTETALAYAWKLIDQQIADSVIFALPTQATANAMLTRMEASASHLFSSPNLILAHGNSRFNHLFQSIKSRAITEQGQEEAWVQCCQSLSQSNKEVFLGQIGVCTI

SEQ ID NO: 495 - protein, 70 aa, Homo sapiens
  misc_feature (6): Xaa equals any of the naturally occurring L-amino acids
KVVGKXQKIPAAVEKKKKLLGKVVKISPHRSVFNCKGGKFTISMERPSGHHLNQVVNMYIITSEISSTLM

SEQ ID NO: 496 - protein, 59 aa, Homo sapiens
  misc_feature (20): Xaa equals any of the naturally occurring L-amino acids
SSSPFLWGFSTFNVADLALXRMGGVALIGGCGFCWEFSSLLGSLQDTVGVFLVDHWVLP

SEQ ID NO: 497 - protein, 111 aa, Homo sapiens
RNFNLQTYCILPPHLSQSSVFPIALFALAPVSSQALCCCCQRINLSVFFGSKLYWPERVFQIPELIMILCTTECRKRTRSFDRPPPAGKADGDPTFCCSDSLPLLVPCMFV

SEQ ID NO: 498 - protein, 52 aa, Homo sapiens
  misc_feature (32): Xaa equals any of the naturally occurring L-amino acids
VLVIIHQRVTEESASALQEATAHCLHFLSLPXGESFRKEEHKHWDARGGGFM

SEQ ID NO: 499 - protein, 49 aa, Homo sapiens
  misc_feature (19): Xaa equals any of the naturally occurring L-amino acids
HFLVDGKVGLMFKSNVRVXVHGPFLSNFFLIKVNTGSKTNSKYSLLCYL

SEQ ID NO: 500 - protein, 180 aa, Homo sapiens
  misc_feature (12): Xaa equals any of the naturally occurring L-amino acids
  misc_feature (36): Xaa equals any of the naturally occurring L-amino acids
  misc_feature (86): Xaa equals any of the naturally occurring L-amino acids
  misc_feature (103): Xaa equals any of the naturally occurring L-amino acids
  misc_feature (153): Xaa equals any of the naturally occurring L-amino acids
GIGELKGFSGAXISLSSPALPLATAGCCLAFGESLXLSRRGFLSAFLPYPQCVMGTALQWMNLTCLGESLLLLLPCFLCSVGYFLXLWEDLVYLGRVFLSSPXLAPAFSVRLPSTQWRLGGYRLVLFLGYLVILLCYANPYTIIQNLFKDRLXSPFLFCAPSNMSLGTKAAVGLFSLGRA

SEQ ID NO: 501 - protein, 61 aa, Homo sapiens
  misc_feature (39): Xaa equals any of the naturally occurring L-amino acids
  misc_feature (41): Xaa equals any of the naturally occurring L-amino acids
SAQQDLSNLWVRVTGLDIVSFSVLEPALGCAVAMRCNRXVXHVLASWPALEVQSQPWPPHL

SEQ ID NO: 502 - protein, 153 aa, Homo sapiens
QPLPTYDEVLLCTPATTFEEVALLLRRCLTLGSLGHKVYSLLFADQLSYEVARQAEELFHNLCTQQHREDYQLVMVCDGDWEHCYLPSAFSQHKVFVTPQAPLEAIQAYLAGHYRVPKQTLSAAAVFNDRLCVGIVASERAGVGKSLYVKRLH

SEQ ID NO: 503 - protein, 35 aa, Homo sapiens
SYWITKIYPENVRKLQALYISLLLVSESGISSHKI

SEQ ID NO: 504 - protein, 33 aa, Homo sapiens
  misc_feature (22): Xaa equals any of the naturally occurring L-amino acids
  misc_feature (25): Xaa equals any of the naturally occurring L-amino acids
NKKEFKSCLPGKNILSFLLKWXKEXLFLPPFYH

SEQ ID NO: 505 - protein, 63 aa, Homo sapiens
  misc_feature (4): Xaa equals any of the naturally occurring L-amino acids
  misc_feature (23): Xaa equals any of the naturally occurring L-amino acids
  misc_feature (45): Xaa equals any of the naturally occurring L-amino acids
FTKXLLLQRLGINSDVSIHTANXLLVIHGRLLKCGLCIIEQLLCXHKACFTQDSLLLSLRRDT

SEQ ID NO: 506 - protein, 157 aa, Homo sapiens
  misc_feature (31): Xaa equals any of the naturally occurring L-amino acids
  misc_feature (33): Xaa equals any of the naturally occurring L-amino acids
KEMNPLPTQLSTGAISFLRSLLEPDPVKRPXIXQALANRWLNENYTGKVPCNVTYPNRISLEDLSPSVVLHMTEKLGYKNSDVINTVLSNRACHILAIYFLLNKKLERYLSGKSDIQDSLCYKTRLYQIEKYRAPKESYEASLDTWTRDLEFHAVQR

SEQ ID NO: 507 - protein, 74 aa, Homo sapiens
  misc_feature (27): Xaa equals any of the naturally occurring L-amino acids
EPVSWCSQTGALCWPRARAEKWPCLGXCTRTLDPRLTRRPKCPMQTLTGWGVAGSTVRLPALRVSLPGIPPRES

SEQ ID NO: 508 - protein, 41 aa, Homo sapiens
  misc_feature (31): Xaa equals any of the naturally occurring L-amino acids
  misc_feature (37): Xaa equals any of the naturally occurring L-amino acids
NYQKLKTMQDSIQLNGILALSVVGVQVDYFXLSLLLXAAGN

SEQ ID NO: 509 - protein, 48 aa, Homo sapiens
  misc_feature (12): Xaa equals any of the naturally occurring L-amino acids
  misc_feature (36): Xaa equals any of the naturally occurring L-amino acids
  misc_feature (39): Xaa equals any of the naturally occurring L-amino acids
  misc_feature (40): Xaa equals any of the naturally occurring L-amino acids
  misc_feature (43): Xaa equals any of the naturally occurring L-amino acids
KCCTSALSNPRXTYIMGATRKTGLCKRNVDLWTNVXGGXXVRXGAVGV

SEQ ID NO: 510 - protein, 103 aa, Homo sapiens
QQSVPGLRPLIKLPPEDQRGVDEGEAFRGHWLLDSNECPGHAARSRRGRHAPPGELDPVAESSEEVEAASGSSKPSFAPPPVSSGLEQLGPMEEVSGQGLGSR

SEQ ID NO: 511 - protein, 71 aa, Homo sapiens
  misc_feature (8): Xaa equals any of the naturally occurring L-amino acids
ADVSSASXFAIYPFTCLRLGNTYFIVLIQVLADGREETPDPQNEINGFSKAAHQTVKVVIPLHLTCSQRGE

SEQ ID NO: 512 - protein, 79 aa, Homo sapiens
  misc_feature (16): Xaa equals any of the naturally occurring L-amino acids
  misc_feature (52): Xaa equals any of the naturally occurring L-amino acids
  misc_feature (58): Xaa equals any of the naturally occurring L-amino acids
  misc_feature (59): Xaa equals any of the naturally occurring L-amino acids
  misc_feature (62): Xaa equals any of the naturally occurring L-amino acids
  misc_feature (67): Xaa equals any of the naturally occurring L-amino acids
LVAKELGQTGTRLTPXDKAEHMKRQRHPRLRPQSAQSSFPPSPGSFFLDVAXGTLGQXXKEXFAPCXHWVFIPERPGPR

SEQ ID NO: 513 - protein, 26 aa, Homo sapiens
LQKSYLTYLCILTISPTKWTSSLRLP

SEQ ID NO: 514 - protein, 85 aa, Homo sapiens
NRYLFTYFLKNLDLNSLIPFGTGVSLQAIRNQKRRTCSLFFWCLSSSFLSFFFIYLFLRQGLHTPSPRWECSGMIMAHHSLDLLG

SEQ ID NO: 515 - protein, 46 aa, Homo sapiens
  misc_feature (7): Xaa equals any of the naturally occurring L-amino acids
CFVFILXTTLYMPLFDYRCDSSGLWQDGTDKSMLCSCGILNEKLDS

SEQ ID NO: 516 - protein, 119 aa, Homo sapiens
  misc_feature (106): Xaa equals any of the naturally occurring L-amino acids
  misc_feature (113): Xaa equals any of the naturally occurring L-amino acids
GAQVWLSQAAPGAQPEGAEEPRGELGGIWQSQPCRKCLCIRPGGTWLPIPDCETACSSFQSEGAYDIILPRATANSQVMGSANSTLRAEDMYSARATRRAHRRKTXRTLKSLXTPTLWD

SEQ ID NO: 517 - protein, 41 aa, Homo sapiens
TAIHLEIRGRLFMFQIKERRLLSRIESRSVFQAWFARCTHH

SEQ ID NO: 518 - protein, 74 aa, Homo sapiens
  misc_feature (73): Xaa equals any of the naturally occurring L-amino acids
WQSHQESKWVSVQPHPLPIRHPAPDPSALLAYQWVGIRVCTAIINGLYFESGCKPDPWKLFDAVSALETQEGXM

SEQ ID NO: 519 - protein, 75 aa, Homo sapiens
  misc_feature (46): Xaa equals any of the naturally occurring L-amino acids
  misc_feature (53): Xaa equals any of the naturally occurring L-amino acids
  misc_feature (65): Xaa equals any of the naturally occurring L-amino acids
NFSSFNSSYPPRVRKQKTNKQTKIGRTKGKDIWKGIVIGLNRKQSXKNLTVGXILLSVVLCGGFXPRSGGYDIYR

SEQ ID NO: 520 - protein, 50 aa, Homo sapiens
CCYFPLDLIPTCKKIRHFSGSDFNFSSERAMQLRVRVVFLKLHPQRCFRN

SEQ ID NO: 521 - protein, 105 aa, Homo sapiens
  misc_feature (95): Xaa equals any of the naturally occurring L-amino acids
HVTSLILSNVLLGSLLFSMHGYFQVIRPILLHFLNAILPISVVLTFNQYFMRIIIFPTGDPFSQPIKFPINGLSDVKNTSEDSENFPSSSKKSEXWPDWSEPGGA

SEQ ID NO: 522 - protein, 44 aa, Homo sapiens
  misc_feature (34): Xaa equals any of the naturally occurring L-amino acids
  misc_feature (37): Xaa equals any of the naturally occurring L-amino acids
PPAGAQWARACNPSTLGRLRRADHEVRRSGDREXPGXNGEPWPY

SEQ ID NO: 523 - protein, 67 aa, Homo sapiens
  misc_feature (22): Xaa equals any of the naturally occurring L-amino acids
GARRGARALPDRAATLVQLSLXQLVLRGAAGHRGEFDALQARDYLEHITSIGPRTTGSPENEILTVH

SEQ ID NO: 524 - protein, 79 aa, Homo sapiens
  misc_feature (14): Xaa equals any of the naturally occurring L-amino acids
  misc_feature (17): Xaa equals any of the naturally occurring L-amino acids
  misc_feature (23): Xaa equals any of the naturally occurring L-amino acids
  misc_feature (25): Xaa equals any of the naturally occurring L-amino acids
  misc_feature (54): Xaa equals any of the naturally occurring L-amino acids
FFSIQHIRHREKDXCNXFYLGRXFXFCMDVQLCRSTLPFWPGHLFLRHFSRVSXWAWVFFQRRHNNGPGFFPDGISSGP

SEQ ID NO: 525 - protein, 75 aa, Homo sapiens
RVEGASRPMRPEGINAPRTQAANFLAAALGRPPQASLNDSPPTQFVRSQCVLLQSGQDTSQASTLWQQHQVQYDA

SEQ ID NO: 526 - protein, 61 aa, Homo sapiens
QVFIKLEVMVTEITFQSGRQNETGTEGIFKIPQKRKNDMVESNRKPKCLSLKDRLRCGSAI

SEQ ID NO: 527 - protein, 78 aa, Homo sapiens
  misc_feature (57): Xaa equals any of the naturally occurring L-amino acids
  misc_feature (73): Xaa equals any of the naturally occurring L-amino acids
SVRGIMSCPRSRANLWQVSGRCLLLRACPGNWPHCPGFTAPWGSVRAVPHTLLPWTXCTSKEKLPAHASWARXFPPWL

SEQ ID NO: 528 - protein, 57 aa, Homo sapiens
FLMLFLDFACFRNYLLTSCFGSWTCSSCPLHPPNSLLFLSPSFQKTCFTIVSGLSCK

SEQ ID NO: 529 - protein, 73 aa, Homo sapiens
  misc_feature (44): Xaa equals any of the naturally occurring L-amino acids
  misc_feature (66): Xaa equals any of the naturally occurring L-amino acids
VRSIFPPKESMHCLTSQLSRKNEILERINKSNLFMVSSLIVVNXEGLKHKKWGWITLNTKISGAKXTSSPSVM

SEQ ID NO: 530 - protein, 125 aa, Homo sapiens
QRKRRKTRRPGPRKPKKERILKSKHWTEVRPEEDCQASKPEQGPCNPCDLPVYIQMACRSHKVWSSQKKKKKKTHKKGKTASSLHCPCPNSSIDLVTISSWDSESQELPTEHLVTPPLLSIDNHL

SEQ ID NO: 531 - protein, 51 aa, Homo sapiens
FFVFALECDWPFSFVCLLESRYICLMKGMCLFVFPFYSLKEFWIIYSFSVW

SEQ ID NO: 532 - protein, 61 aa, Homo sapiens
WKYSQSILPCFVRSLGLANTFKEIFPPNVPQELCFHFSCASTEWRESRQSGRDAKSLANYF

SEQ ID NO: 533 - protein, 59 aa, Homo sapiens
  misc_feature (54): Xaa equals any of the naturally occurring L-amino acids
DNEKFTVLDHLSSPIEGYFTYFHDVSIKLFVVNIDKSYYCTCRSGINKRPCWGXTTCYI

SEQ ID NO: 534 - protein, 43 aa, Homo sapiens
  misc_feature (3): Xaa equals any of the naturally occurring L-amino acids
  misc_feature (23): Xaa equals any of the naturally occurring L-amino acids
  misc_feature (25): Xaa equals any of the naturally occurring L-amino acids
INXLILNVQMIMQKTSLLVRILXSXLMLKLVPFQNVAGDNLLP

SEQ ID NO: 535 - protein, 69 aa, Homo sapiens
QQEFLPISTTVAEKLLFNSSVRPVQESARHLLVHTAPCIGVELDLDSELQEVLSYRRLIGIENNMRRKR

SEQ ID NO: 536 - protein, 62 aa, Homo sapiens
  misc_feature (4): Xaa equals any of the naturally occurring L-amino acids
  misc_feature (7): Xaa equals any of the naturally occurring L-amino acids
  misc_feature (56): Xaa equals any of the naturally occurring L-amino acids
IQCXIIXLRGSGHPATANCYQIKVQAQDDSSSSTSWATRGELRLQRKKMNRIQQYXERIYIL

SEQ ID NO: 537 - protein, 118 aa, Homo sapiens
  misc_feature (12): Xaa equals any of the naturally occurring L-amino acids
  misc_feature (14): Xaa equals any of the naturally occurring L-amino acids
IEVRMQYRSGNXGXTHASGLLLLRDSTSLLLKASSDMFVFVIQICSQKIDLSGDSLSIMHILCLLSRILFTRNTSKQRKLYLHEPEHVEMHTMYTGNAVSISQSLPSTACVVSPSHLV

SEQ ID NO: 538 - protein, 184 aa, Homo sapiens
  misc_feature (43): Xaa equals any of the naturally occurring L-amino acids
  misc_feature (55): Xaa equals any of the naturally occurring L-amino acids
  misc_feature (57): Xaa equals any of the naturally occurring L-amino acids
  misc_feature (59): Xaa equals any of the naturally occurring L-amino acids
  misc_feature (64): Xaa equals any of the naturally occurring L-amino acids
  misc_feature (79): Xaa equals any of the naturally occurring L-amino acids
  misc_feature (179): Xaa equals any of the naturally occurring L-amino acids
RLPGLWGFPGNRAPLALCPAWPALVVLCPTRPRGSQLVGLISXRTPSPAQRLILXGXCXGFLVXHIVALLPAEFACHLXVWLWVPVQPLGERGAPKRPGSLAVSSSCLAAGGGSLLAPWRRPERGASCSASSAFVAAATTATGKTFFLKNVFLWPGVAAHACYLSTLGGQGKRITKSGXQDHPG

SEQ ID NO: 539 - protein, 70 aa, Homo sapiens
  misc_feature (57): Xaa equals any of the naturally occurring L-amino acids
  misc_feature (58): Xaa equals any of the naturally occurring L-amino acids
  misc_feature (64): Xaa equals any of the naturally occurring L-amino acids
LNTFLGHELRHSVHSLYMCFGPVFGFTYVSVASGKSGNFLLTPLIVKQIILVLPTDXXWAIWGXHLGCWN

SEQ ID NO: 540 - protein, 91 aa, Homo sapiens
  misc_feature (18): Xaa equals any of the naturally occurring L-amino acids
  misc_feature (88): Xaa equals any of the naturally occurring L-amino acids
SPPLTWSLKPEASGPLGXGLNGGGWSLGLWIGKHPAVTCRARARCSEKPSVLYLLTQVRYSRIARNKQIEKEGTRRHPCALVSTCVSXYII

SEQ ID NO: 541 - protein, 158 aa, Homo sapiens
VRDDGQAGSIRQLSQKGVLCLLTQILGIVMCVGCVCVYPQVMFEAPSELTQRPQVGCYIHGLFLEGARWDPEAFQLAESQPKELYTEMAVIWLLPTPNRKAQDQDFYLCPIYKTLTRAGTLSTTGHSTNYVIAVEIPTHQPQRHWIKRGVALICALDY

SEQ ID NO: 542 - protein, 62 aa, Homo sapiens
TASLLLTTWLCTESVVLSWMVLKSLAHPASWVSLSFVHIDHLPSYQQSVPRHIQYSWLCSSL

SEQ ID NO: 543 - protein, 70 aa, Homo sapiens
  misc_feature (51): Xaa equals any of the naturally occurring L-amino acids
  misc_feature (56): Xaa equals any of the naturally occurring L-amino acids
NIFYSQYINFNCTPYQIFWKFPSRHYFAYFFLIKWLVQMEIFIGWTTWKTXVLQIXQTIDLGNISWNPYI

SEQ ID NO: 544 - protein, 46 aa, Homo sapiens
  misc_feature (27): Xaa equals any of the naturally occurring L-amino acids
  misc_feature (38): Xaa equals any of the naturally occurring L-amino acids
  misc_feature (40): Xaa equals any of the naturally occurring L-amino acids
  misc_feature (45): Xaa equals any of the naturally occurring L-amino acids
FCFHICYFNPDDKFLKMGYNLLLCIPXFTSEGIGDFGXWXKVERXF

SEQ ID NO: 545 - protein, 40 aa, Homo sapiens
KFLLTFFFPRESLGIFSGVFSVGDFKQNSKAQLLECYQGK

SEQ ID NO: 546 - protein, 60 aa, Homo sapiens
  misc_feature (10): Xaa equals any of the naturally occurring L-amino acids
  misc_feature (30): Xaa equals any of the naturally occurring L-amino acids
KIVILLKCNXIPNLVLPLYLTAGPYSKVIXIPAQWLILVVSALWEAKVGRLLETWSSRPA

SEQ ID NO: 547 - protein, 86 aa, Homo sapiens
  misc_feature (38): Xaa equals any of the naturally occurring L-amino acids
  misc_feature (39): Xaa equals any of the naturally occurring L-amino acids
RAGASPSLHVHGAESRRGGQAPGKVPRLWPTEEVPVTXXATGAGLTFPFLYFTGLLQTWWLRPFGLAFRFLASSPRSANSSSCFFR

SEQ ID NO: 548 - protein, 16 aa, Homo sapiens
KKKCSRLLVVSLKLAH

SEQ ID NO: 549 - protein, 67 aa, Homo sapiens
  misc_feature (2): Xaa equals any of the naturally occurring L-amino acids
PXWGPVGRCLSLIKSPFLTPRSQSHRAPHKGVLSVPFLGPPIWCVFTPLSISHYCECLPEQIIPYYD

SEQ ID NO: 550 - protein, 52 aa, Homo sapiens
VLEVLSDRMRVRVRETELLFSCILTVTKIFLGYSAVIPHLYKKPGSNTFSPF

SEQ ID NO: 551 - protein, 65 aa, Homo sapiens
GTRTHVGYRGFQPHTQLKQLELHILCWSDWECNLLTLLVKAISTGTGSQANEQDKLHRKIIIRPF

SEQ ID NO: 552 - protein, 57 aa, Homo sapiens
HRGCLGESLASTHKMPAFNADSCPSPSCDSQKCLQTWPGVPRGQNCPWLRPTDECVQ

SEQ ID NO: 553 - protein, 50 aa, Homo sapiens
LFLTFFQAKSYQPWKHHCSLLPVTVAKLYHGGGEARGRSGWGSEPQPGPE

SEQ ID NO: 554 - protein, 78 aa, Homo sapiens
GGGHFFSQKMSIYYCLTDFFDYIPLLLSSLLFFFFLFGFCFCSLSLLSYFVALVECCMASIVLYVINFAQKQTFSIVG

SEQ ID NO: 555 - protein, 64 aa, Homo sapiens
  misc_feature (60): Xaa equals any of the naturally occurring L-amino acids
EALVKVTAQRHRLPKGLRPNHRTTEPFPFPHMLLIVLQASLQQLQLLLPGTSHLVIKKKXQLDL

SEQ ID NO: 556 - protein, 99 aa, Homo sapiens
  misc_feature (80): Xaa equals any of the naturally occurring L-amino acids
CMTSQILPAINPSMFLCLENDSLPLNLPSFAFGCPWGAISTHCGELGLPNRQHHGYLFSQVQYAELKLCSSHSPLRKKRXSLGAHTDFGQQHPILCLVE

SEQ ID NO: 557 - protein, 82 aa, Homo sapiens
EYYTNGKFSGKTQTSFKSSSLPIFFMFVPGQLIVTGEKHGYMTGVTLNLSSSPVASDLSMLPNNPSVFTYLFEESIIGSFFF

SEQ ID NO: 558 - protein, 56 aa, Homo sapiens
  misc_feature (3): Xaa equals any of the naturally occurring L-amino acids
  misc_feature (17): Xaa equals any of the naturally occurring L-amino acids
  misc_feature (24): Xaa equals any of the naturally occurring L-amino acids
  misc_feature (38): Xaa equals any of the naturally occurring L-amino acids
  misc_feature (41): Xaa equals any of the naturally occurring L-amino acids
  misc_feature (43): Xaa equals any of the naturally occurring L-amino acids
  misc_feature (48): Xaa equals any of the naturally occurring L-amino acids
  misc_feature (50): Xaa equals any of the naturally occurring L-amino acids
  misc_feature (51): Xaa equals any of the naturally occurring L-amino acids
KYXKLAGVVVHTVIPAXREAEAGXSLWAQETEGSVGRXCAXAXQPGRXSXXVSKKK

SEQ ID NO: 559 - protein, 50 aa, Homo sapiens
LSHTSVEAGVFLNRSHLCMAGCQTEPPTQKGPTLGFFLLSYHPGILTDYL

SEQ ID NO: 560 - protein, 42 aa, Homo sapiens
TFVVIKNITGERGPAVKKTLQDIMVVENDSIVVTSITALSCE

SEQ ID NO: 561 - protein, 100 aa, Homo sapiens
  misc_feature (67): Xaa equals any of the naturally occurring L-amino acids
  misc_feature (76): Xaa equals any of the naturally occurring L-amino acids
  misc_feature (89): Xaa equals any of the naturally occurring L-amino acids
  misc_feature (92): Xaa equals any of the naturally occurring L-amino acids
  misc_feature (99): Xaa equals any of the naturally occurring L-amino acids
HHDQFLLLLYVCIFQPQVYGYDDLQMLQTRFPLDYYSIPFPTPTTPLTGRDGSLASNPYSGDPHKSXGRGGCLLPXPGPQTFGPNPQPXTQXADSPLPXQ

SEQ ID NO: 562 - protein, 72 aa, Homo sapiens
  misc_feature (45): Xaa equals any of the naturally occurring L-amino acids
SAFKFPNLKQTKQNNALQTLLETFERNLISVCFESIYCNQGIGGXVVFLRFCHKFNKIYMAGRVLAEKCKSL

SEQ ID NO: 563 - protein, 44 aa, Homo sapiens
TCILGSMYKKVLPSQEGGQEKNFLMFIAALQYPKVRNEPNIQQW

SEQ ID NO: 564 - protein, 24 aa, Homo sapiens
KQYLMNILAPILIKTEMIALQAKD

SEQ ID NO: 565 - protein, 45 aa, Homo sapiens
  misc_feature (8): Xaa equals any of the naturally occurring L-amino acids
ARLGGVGXDRVRAKALGWYLAGDGELVHVFRWGVELSGLYFRALA

SEQ ID NO: 566 - protein, 51 aa, Homo sapiens
  misc_feature (45): Xaa equals any of the naturally occurring L-amino acids
  misc_feature (50): Xaa equals any of the naturally occurring L-amino acids
  misc_feature (51): Xaa equals any of the naturally occurring L-amino acids
LQDSILGFLMSINVNILHFQQKYPLKLNLNIIPHSTVSGLLKLRXLLIRXX

SEQ ID NO: 567 - protein, 19 aa, Homo sapiens
IRHEEIETILANTVRPRLY

SEQ ID NO: 568 - protein, 58 aa, Homo sapiens
  misc_feature (25): Xaa equals any of the naturally occurring L-amino acids
  misc_feature (43): Xaa equals any of the naturally occurring L-amino acids
KNVFQLGWRLTPVIPTLWEVEAGGXLEPRSLRLAWGNTVGTSXFKKLIKKGPGAGWLT

SEQ ID NO: 569 - protein, 64 aa, Homo sapiens
  misc_feature (58): Xaa equals any of the naturally occurring L-amino acids
  misc_feature (61): Xaa equals any of the naturally occurring L-amino acids
  misc_feature (63): Xaa equals any of the naturally occurring L-amino acids
ECVCTHVHARTYVEAEDNACSCPIPTTDLVATGSQTLFIIKVIDLESQWAGSLHYTTXECXCXS

SEQ ID NO: 570 - protein, 37 aa, Homo sapiens
TFKVVTCPSSWSSVAEFLKPNLCLHKIRCKKKKIPVK

SEQ ID NO: 571 - protein, 86 aa, Homo sapiens
ILRGIYLLLIPGVSGGKPSYIPKQDRSASSVFPKESQAVRSYLRSSHVCNKSGKKTKWRKTIQLAKKKKIIKKKQRSKKRKNQKAL

SEQ ID NO: 572 - protein, 60 aa, Homo sapiens
NSHYLLEAHFANVLFRMYHRYNVLTNKIEWFFSMNESHSSANIVYPVSVGYSITHSSTPL

SEQ ID NO: 573 - protein, 26 aa, Homo sapiens
QKYIKLLKWSNFSTRHPQPDCSGGYC

SEQ ID NO: 574 - protein, 91 aa, Homo sapiens
NTMGFFVCPDHLLPTSSIKCFPIWINLHRQLPKTLEVSRGLVQELSSCCLKDFRASLFSLWPAGCTRPRTALNVLQHEFVNFLKIQKKKKK

SEQ ID NO: 575 - protein, 91 aa, Homo sapiens
  misc_feature (20): Xaa equals any of the naturally occurring L-amino acids
LGGPPPSFSLSRFLSSVLSXVLCPPPLSSPCCPMSLLPEKEHSYSRCPSRKERPRWMEGPTVYICTESFIKFSTLLKKVFLTWAVGQFVCL

SEQ ID NO: 576 - protein, 63 aa, Homo sapiens
AFMNYSIYSSCWHDNFAIFHALKIRQILRVILVILSIICGVFLEGEATGCFYFPVIFSLSLKE

SEQ ID NO: 577 - protein, 58 aa, Homo sapiens
QLQWILPAFLLSINGITGYCGRWTTDFFHSCMHDPLQCDFYSGRGRVYFHTLESRLAF

SEQ ID NO: 578 - protein, 123 aa, Homo sapiens
FCFGSHQHRGPWGSPFLLSAEVQVPMQMLRVGKAKADVWPKTAPKKDENSLVPPAPVDSDGESDNSDRVPVPSFQNSFSQAIEAAFMKLDTPATSDPLSEEKGGKKRKKQKQKLLFSTSVVHT

SEQ ID NO: 579 - protein, 61 aa, Homo sapiens
MSRCAHNLQIAGHLRMLTAAVETSSLWLWPWGEGATVDLGRVSRCSLRLPNRPDPHRPCLL

SEQ ID NO: 580 - protein, 77 aa, Homo sapiens
ARAGITGVTHLTQPESGLKRVYSSIEFKDSLLGNTDSKGWKSVFCECEVWIVYIDRLGKLNRISTSVSPGSYFLCRL

SEQ ID NO: 581 - protein, 76 aa, Homo sapiens
KASTWFLRTFWIHPFMHIPDHISTGAVEMREMGMGLTRTRGIFITDPLTEVSKSQEQGCAPQKHRAQWKISLLLFV

SEQ ID NO: 582 - protein, 25 aa, Homo sapiens
VLKGNKLLELSFPVKKKKKKKKKKK

SEQ ID NO: 583 - protein, 79 aa, Homo sapiens
  misc_feature (67): Xaa equals any of the naturally occurring L-amino acids
LMSHCLKFSPKPKRRINMIVPTSWFFKCERPETSSEAKRACAATAVSIWRRNYNAPTPRTKPGFFYXFCRCHDVTTPAP

SEQ ID NO: 584 - protein, 71 aa, Homo sapiens
  misc_feature (44): Xaa equals any of the naturally occurring L-amino acids
MIGGKEEDGSQGISPSPCLRWHLQHLLHDLCLLRVTFHPLKAGXRPDVANLIGCSYLSFYNPKVFLIGFSS

SEQ ID NO: 585 - protein, 53 aa, Homo sapiens
PSVSISLHRDFMGITLNDTCKELGCGRNTTASGCNFVVVCVSKMMDADMSHSS

SEQ ID NO: 586 - protein, 101 aa, Homo sapiens
  misc_feature (100): Xaa equals any of the naturally occurring L-amino acids
TRCRDAQKVLEMEHTQQMKLKERQKFFEEAFQQDMEQYLSTGYLQIAERREPIGSMSSMEVNVDMLEQMDLMDISDQEALDVFLNSGGEENTVLSPALGXG

SEQ ID NO: 587 - protein, 48 aa, Homo sapiens
AIVVEGFELGKFLWVFPKGAVTLYRYPPIYSHGTSKRDFSLYRYKCLE

SEQ ID NO: 588 - protein, 118 aa, Homo sapiens
  misc_feature (10): Xaa equals any of the naturally occurring L-amino acids
  misc_feature (44): Xaa equals any of the naturally occurring L-amino acids
HIEGTPAVPXRNSRVDPRVRPRSGGHRLRAAVSSGMGQLRAWGXLACPWREHLQGGAPESREHCGELLRAELTRRQLINPPPMDRGAPSTGEDSALCPHARWVPVTLSCPAARGQQWV

SEQ ID NO: 589 - protein, 89 aa, Homo sapiens
PCIINKNVSYSNNKMLFTINLKIAHFGLSGSPQNPPSVVLLFRELASSFLRNDPCPRSSGITHPLEVILKSMWCSSGSNFSICPLCSCH

SEQ ID NO: 590 - protein, 90 aa, Homo sapiens
GREDARRAAPSPGPRGALGAVPGLARGPASGPTRPLSPSDPPCVPRHGPSAREARAHRGAPARRRGSRSSRCAAWAGAAAREEAVLIRDR

SEQ ID NO: 591 - protein, 179 aa, Homo sapiens
  misc_feature (61): Xaa equals any of the naturally occurring L-amino acids
  misc_feature (67): Xaa equals any of the naturally occurring L-amino acids
  misc_feature (71): Xaa equals any of the naturally occurring L-amino acids
  misc_feature (139): Xaa equals any of the naturally occurring L-amino acids
  misc_feature (141): Xaa equals any of the naturally occurring L-amino acids
  misc_feature (169): Xaa equals any of the naturally occurring L-amino acids
QGTTLTFLDSHCEVNRDWLQPLLHRVKEDYTRVVCPVIDIINLDTFTYIESASELRGGFDXSLHFQXEQLXPEQKARRLDPTEPIRTPIIAGGLFVIDKAWFDYLGKYDMDMDIWGGENFEISFRVWMCGGSLEIVPCXRXGHVFRKKHPYVFPDGNATPYIKNTKRTXEVWMDEYKQY

SEQ ID NO: 592 - protein, 71 aa, Homo sapiens
ARARACRVHAGPHLILHSWQSRPFLLEHVDKSQRGQCAGPMSPSEWRGHATVRARSDPALAPLSLWIIRGL

SEQ ID NO: 593 - protein, 78 aa, Homo sapiens
  misc_feature (42): Xaa equals any of the naturally occurring L-amino acids
DITGKHWRAICGDTEASHTDRKQMNGRGCEFGWKGCHGDSDXILESGALWSLPDAGGLDSDFSEDNISRETRCEDKLV

SEQ ID NO: 594 - protein, 139 aa, Homo sapiens
  misc_feature (104): Xaa equals any of the naturally occurring L-amino acids
  misc_feature (111): Xaa equals any of the naturally occurring L-amino acids
  misc_feature (137): Xaa equals any of the naturally occurring L-amino acids
ARGKILPEAGKPRAGRRETPIPSDWGWLVARGSPRAGRIRPPAAPTRPDPPTCLGPPKSIRPPAPAPSPGWPGPRGRGGNPWEQGDSGRGGIAVGEKAERGKEXRGSGDGXEESGSCRRPKERHNWAKIKGCKGWEXPN

SEQ ID NO: 595 - protein, 100 aa, Homo sapiens
EPAGVGELGDLRTGGARTRGSRGGASEAEEQAVEARQEEEQDLDGEKGPSSEGPEEEDGEGFSFKYSPGKLRGNQYKKMMTKEELEEEQRIELTSDLTSL

SEQ ID NO: 596 - protein, 61 aa, Homo sapiens
  misc_feature (55): Xaa equals any of the naturally occurring L-amino acids
ALWQTCYKKRLVSCKIPSCRDFLLKVSFIFLRLHLKKKKKNSRGGPYPAFVPFMXGLIARS

SEQ ID NO: 597 - protein, 68 aa, Homo sapiens
WEQGYKCIFHGPNTDSGKDTVVDHREKNFTKEIDAQMDSEGHPGESQGLNAGLKWPVVERIILIKELR

SEQ ID NO: 598 - protein, 58 aa, Homo sapiens
ALFKYLQMPVISEGNSKSLYFLATILIIWSLGKRLQSASVSSSPPRNFLPETVTSSVL

SEQ ID NO: 599 - protein, 123 aa, Homo sapiens
  misc_feature (23): Xaa equals any of the naturally occurring L-amino acids
  misc_feature (26): Xaa equals any of the naturally occurring L-amino acids
  misc_feature (27): Xaa equals any of the naturally occurring L-amino acids
  misc_feature (40): Xaa equals any of the naturally occurring L-amino acids
ARPGFGPQMTGSEPRHLDSLKYXEKXXGAFSYSFAYTHTXTQQFTSNNRYVEVFPHTPSNLQWTPTACPKNQFNSDTIYWETVSDPTSLFPPPNTTDGNCKPQVATCASVQLAIHWDSHDPPP

SEQ ID NO: 600 - protein, 77 aa, Homo sapiens
  misc_feature (28): Xaa equals any of the naturally occurring L-amino acids
PPHLANVDRSLHATIVHSKYFVTCRADXQNIYCLAKSSVHPTSGIWVPLISHYTQFNPWTSGPEGSPGDPQGELGGY

SEQ ID NO: 601 - protein, 49 aa, Homo sapiens
ALMQIAPLSRRLKASVHSGQESTLLKQTVDVVRDLARPTGQTVIGHLTV

SEQ ID NO: 602 - protein, 101 aa, Homo sapiens
NRAGCEGRWLGGWGPPIAISASLSSHPLSFVSLQPIPVRTVNNSHMVVTSQGPELVRQLFSQGHNEESVSAKTQESWKEDLNSLFSGRRMGKGRLNRLPFN

SEQ ID NO: 603 - protein, 44 aa, Homo sapiens
  misc_feature (12): Xaa equals any of the naturally occurring L-amino acids
IDPMFTFYTHTXKSLTSVELPSFSLRKLACCISSVILRNLQVYF

SEQ ID NO: 604 - protein, 56 aa, Homo sapiens
SLNGKRSGHVTKNCPVVEASPLGRREPRGARPARELCPQRQSKGVESSGKKKKKKK

SEQ ID NO: 605 - protein, 54 aa, Homo sapiens
  misc_feature (5): Xaa equals any of the naturally occurring L-amino acids
  misc_feature (20): Xaa equals any of the naturally occurring L-amino acids
  misc_feature (49): Xaa equals any of the naturally occurring L-amino acids
LPFLXPLTPPPTLPSLTPFXALTHPTLVIPLYHVTPDPNGSHKQSQVYXGLISL

SEQ ID NO: 606 - protein, 77 aa, Homo sapiens
PAFLQLSQRWVSPADVGIWPTAQRSVCVNNIGNFNCGFARDLCSRFHQATWLEGHGHHSLGCFEGFSWLYGPLDFAY

SEQ ID NO: 607 - protein, 28 aa, Homo sapiens
VGRTLRAVPAPLPVCVCAGRTVVPRDHT

SEQ ID NO: 608 - protein, 52 aa, Homo sapiens
PTRPPTRAGDYRRDTRAQLQTSFNHCTRVTDTMVYYLILSAQHLFLLGINIL

SEQ ID NO: 609 - protein, 86 aa, Homo sapiens
EGCHYLRENAIFPFLPPSLPSFLPSSHSSFLRLSFLLTVGRFIKRDVEKNGIFQIQGRPFLILGVQRMTDNYRFYRANKPSSKTSS

SEQ ID NO: 610 - protein, 31 aa, Homo sapiens
  misc_feature (1): Xaa equals any of the naturally occurring L-amino acids
XLQLSGEENCRHSGLICSPGTKYSSHLHLVF

SEQ ID NO: 611 - protein, 83 aa, Homo sapiens
  misc_feature (38): Xaa equals any of the naturally occurring L-amino acids
  misc_feature (55): Xaa equals any of the naturally occurring L-amino acids
  misc_feature (70): Xaa equals any of the naturally occurring L-amino acids
CYVSPVHHIMHVGCPTISNTKLGHFVIFPFVINKSSVXDILRLKGIINDNYGSQXTGGYHLQSAKKKITXTADLYCHENITEG

SEQ ID NO: 612 - protein, 86 aa, Homo sapiens
ECIRKYFYTLKYFFQSYFGRKSLYAKVFHIMEGRMGTLGTPLFPSSSGKNGEFSTLQDGIGNVMLIAGNVFFKVGGHGLEYGKLIH

SEQ ID NO: 613 - protein, 65 aa, Homo sapiens
  misc_feature (58): Xaa equals any of the naturally occurring L-amino acids
  misc_feature (61): Xaa equals any of the naturally occurring L-amino acids
TLHPLYRLSISYLKCLGPEVFQILEYLYKHDQVSWGWDPNLNMKFIHVSHTSYSHRLXVIXYNIL

SEQ ID NO: 614 - protein, 59 aa, Homo sapiens
PRVRTNRIISCVHTLEDFYIIKMSTLPDVMNKFSAIPITISVTFFYRNITNNSFYLPYF

SEQ ID NO: 615 - protein, 63 aa, Homo sapiens
  misc_feature (62): Xaa equals any of the naturally occurring L-amino acids
  misc_feature (63): Xaa equals any of the naturally occurring L-amino acids
TPTFPEGFKIIFRFWLSFVFPMAFCSLKFVLHLCPQLLSSFLQRILSSFTGGMVERERDLKXX

SEQ ID NO: 616 - protein, 42 aa, Homo sapiens
  misc_feature (16): Xaa equals any of the naturally occurring L-amino acids
  misc_feature (21): Xaa equals any of the naturally occurring L-amino acids
  misc_feature (40): Xaa equals any of the naturally occurring L-amino acids
IILQGKIYEWQISTRXTAALXISYPVKMAHWKPTMENGHXHN

SEQ ID NO: 617 - protein, 32 aa, Homo sapiens
GHPGKNIPGTWYRYIKTLKDGWMPDSLDLLID

SEQ ID NO: 618 - protein, 43 aa, Homo sapiens
  misc_feature (38): Xaa equals any of the naturally occurring L-amino acids
  misc_feature (39): Xaa equals any of the naturally occurring L-amino acids
  misc_feature (43): Xaa equals any of the naturally occurring L-amino acids
EREMCGESGNHRSPGEVLFTQPKTIGSVRWPFQKRRLXXLPFX

SEQ ID NO: 619 - protein, 39 aa, Homo sapiens
VFYSFLWQLLSYFIKLPQAHHPDQQQSTFRQELLPANRL

SEQ ID NO: 620 - protein, 53 aa, Homo sapiens
  misc_feature (44): Xaa equals any of the naturally occurring L-amino acids
  misc_feature (48): Xaa equals any of the naturally occurring L-amino acids
GHTRGHTRRTGKDASTVREKKAKKVQVTSSYAGTRPCIYILLFXDSQXASLSS

SEQ ID NO: 621 - protein, 34 aa, Homo sapiens
DSVKNLFLKWEKKKGGRSRGSKLTLRVHATFIAL

SEQ ID NO: 622 - protein, 41 aa, Homo sapiens
KLTVKTYSADFKIKDTRKALRKAPVVTNDTHEKGNIIPRAD

SEQ ID NO: 623 - protein, 81 aa, Homo sapiens
  misc_feature (67): Xaa equals any of the naturally occurring L-amino acids
PTRSALKLTFFFSPLSILRLLLLHNCLSKPKYVRGSRLSLREINYGEKWKRKDVQYESPSRRNLFFXGKGRFKKKEKGRPL

SEQ ID NO: 624 - protein, 85 aa, Homo sapiens
  misc_feature (13): Xaa equals any of the naturally occurring L-amino acids
IMTEFVSFCISFXWDHLPDKLLILGSLFHGLLLKNPNYYRHFQTKFEDANINKTAIPILGIYLRGSTSYVHWETPPKISQYSILC

SEQ ID NO: 625 - protein, 42 aa, Homo sapiens
  misc_feature (28): Xaa equals any of the naturally occurring L-amino acids
  misc_feature (39): Xaa equals any of the naturally occurring L-amino acids
VNLARSHNAKKIYRNQSYYYITAIKSRXLEVFKWTSVTXVLN

SEQ ID NO: 626 - protein, 64 aa, Homo sapiens
  misc_feature (23): Xaa equals any of the naturally occurring L-amino acids
AHEFKISLGNKVNPLSTKIQKSXGCGGAHLWSQLLWRLRWEDCVTWVVKVVVSQDCTTALQPER

SEQ ID NO: 627 - protein, 61 aa, Homo sapiens
QMPARLWRKRNTYTVLWEYKLVQPLWKTVWRFLKVLKTEISFNSASPLLGIYPKEYFRFLI

SEQ ID NO: 628 - protein, 48 aa, Homo sapiens
PTRPVKATWESRDNQGRPVCQGTYLGMKGEILFEARGGVQCQERVLLK

SEQ ID NO: 629 - protein, 26 aa, Homo sapiens
  misc_feature (20): Xaa equals any of the naturally occurring L-amino acids
  misc_feature (22): Xaa equals any of the naturally occurring L-amino acids
PRVRHNEVQKIELPGRLCNXCXHYIQ

SEQ ID NO: 630 - protein, 65 aa, Homo sapiens
  misc_feature (12): Xaa equals any of the naturally occurring L-amino acids
  misc_feature (35): Xaa equals any of the naturally occurring L-amino acids
  misc_feature (46): Xaa equals any of the naturally occurring L-amino acids
  misc_feature (56): Xaa equals any of the naturally occurring L-amino acids
  misc_feature (59): Xaa equals any of the naturally occurring L-amino acids
  misc_feature (61): Xaa equals any of the naturally occurring L-amino acids
PNYFVNLLTKLXFSYKPFHQESSVLIWFTGKFYWXLRNKVELILHXLFPESWKKQXLLXEXIPKE

SEQ ID NO: 631 - protein, 41 aa, Homo sapiens
  misc_feature (7): Xaa equals any of the naturally occurring L-amino acids
INSVIKXDITPDNKEIKKTLRDTYEQLYNNKLNNLEEMGNS

SEQ ID NO: 632 - protein, 32 aa, Homo sapiens
ECTCFELLKDKKVICKRVFKKEADKDKKNCQY

SEQ ID NO: 633 - protein, 49 aa, Homo sapiens
TGWRRITLMPSRDMPEFTGNIAIKQSTLLMNPVKASESFYTVCQATTDK

SEQ ID NO: 634 - protein, 110 aa, Homo sapiens
AKYAKHTQISSNSPAFMNLHSKTILHLPVLMVSHGNHQDLISDSEKESNNRVPWRACKIYRSLKVTHSNKASCLRSAVCHMPDSSDSTGSSAHPQSRSLFSTLHGDFPLV

SEQ ID NO: 635 - protein, 69 aa, Homo sapiens
STWLQLRERPRDPESVHTRGLVRKVLVKCHLHLGPPSLKCHSQPLNSHLLVAYSTVYSSFLFIVCFPLM

SEQ ID NO: 636 - protein, 39 aa, Homo sapiens
RYLYFCIVVFIDFSKAEVFNLEDEICIEYRNDVSYLVCK

SEQ ID NO: 637 - protein, 145 aa, Homo sapiens
TTPIVWSSSRRCEPPASLRLACGLVGGRRYERPLVENGKVVGWYTGWRADRPFAIDMAGFAVSLQVILSNPKAVFKRRGSQPGMQESDFLKQITTVEELEPKAITALRYSLHLCCPTSSVTMKSALPKLFPSPSGSRVAHSDREG

SEQ ID NO: 638 - protein, 60 aa, Homo sapiens
  misc_feature (4): Xaa equals any of the naturally occurring L-amino acids
  misc_feature (7): Xaa equals any of the naturally occurring L-amino acids
VVIXVSXSKGFPHFSCLFWLDLKLFLGINILHTLSTAYLQHSSFHCHVIICLLIALPHDH

SEQ ID NO: 639 - protein, 59 aa, Homo sapiens
  misc_feature (19): Xaa equals any of the naturally occurring L-amino acids
  misc_feature (34): Xaa equals any of the naturally occurring L-amino acids
  misc_feature (44): Xaa equals any of the naturally occurring L-amino acids
  misc_feature (56): Xaa equals any of the naturally occurring L-amino acids
KSRKIITWNVSTQKYPIVXVFVLSFHFYASPPQXHNLNLQLNSXQYLSGVPLSPKXLEC

SEQ ID NO: 640 - protein, 46 aa, Homo sapiens
  misc_feature (1): Xaa equals any of the naturally occurring L-amino acids
XRILRDLKKKKKTYTHKAVDHSIVFQSNRCWFCLDNENGHYRWHHL

SEQ ID NO: 641 - protein, 124 aa, Homo sapiens
  misc_feature (81): Xaa equals any of the naturally occurring L-amino acids
  misc_feature (96): Xaa equals any of the naturally occurring L-amino acids
LPQGGGSQSPLRAGEEATRPGSHSRPHCRPKHHFKRTMDLFLLIFLLRKFLGGRCCPGRGRAQQTQQPNCPFCFRLLCQPXRLPALAPSEPEGSWXSGFLAWMLAAPGERTQAPSSNGHHPPPR

SEQ ID NO: 642 - protein, 214 aa, Homo sapiens
PRVRVTTSAGGTNNLSDSYAAGFLWLNTLGMLANQGIDVVIRHSFFDHGYNHLVDQNFNPLPDYWLSLLYKRLIGPKVLAVHVAGLQRKPRPGRVIRDKLRIYAHCTNHHNHNYVRGSITLFIINLHRSRKKIKLAGTLRDKLVHQYLLQPYGQEGLKSKSVQLNGQPLVMVDDGTLPELKPRPLRAGRTLVIPPVTMGFFVVKNVNALACRYR

SEQ ID NO: 643 - protein, 85 aa, Homo sapiens
QAGLTRNRTACDRLRDKQGLESESKQREWKFTAALCECSSDHFLVTFSSGNCYSSKRGTESQDLIVETLFSATLGNRRQPLLNGR

SEQ ID NO: 644 - protein, 45 aa, Homo sapiens
MRKLIWKKIIFHPLHIYIFPETRSYVYSFCTHWGIGIVIYSTNIN

SEQ ID NO: 645 - protein, 47 aa, Homo sapiens
QYTHFPDEKLKRQGPRLKPSNQSDFTHNLFSFITLQKDERTCTKSPS

SEQ ID NO: 646 - protein, 28 aa, Homo sapiens
  misc_feature (18): Xaa equals any of the naturally occurring L-amino acids
CFCFLHDLRDLCIKKLLXCVLDTQHIEM

SEQ ID NO: 647 - protein, 88 aa, Homo sapiens
  misc_feature (56): Xaa equals any of the naturally occurring L-amino acids
  misc_feature (64): Xaa equals any of the naturally occurring L-amino acids
  misc_feature (69): Xaa equals any of the naturally occurring L-amino acids
  misc_feature (77): Xaa equals any of the naturally occurring L-amino acids
  misc_feature (79): Xaa equals any of the naturally occurring L-amino acids
  misc_feature (80): Xaa equals any of the naturally occurring L-amino acids
KPFPPMLPALASCCHFSPPEQAARLKKLQEQEKQQKVEFRKRMEKEVSDFIQDSGXDQEKVFSXWNKIXEEHYYMMXVXXGLGLDILF

SEQ ID NO: 648 - protein, 71 aa, Homo sapiens
RCVASGELSDYISLQTSFSKIRDPHGKPSIQEPLCILQHALGPQAVSFMCNFFICDRFNVDNNAYLISNPV

SEQ ID NO: 649 - protein, 83 aa, Homo sapiens
  misc_feature (48): Xaa equals any of the naturally occurring L-amino acids
TLRLISLRLSEDNGLIMDLTSFLDSVLCSWVFSTQTTCPQMLHPHQNXKIEKKVGQRVWNKKCKIGYHPKVIKSNVGFAPADL

SEQ ID NO: 650 - protein, 84 aa, Homo sapiens
  misc_feature (1): Xaa equals any of the naturally occurring L-amino acids
XRVPVSQLLRAEQENRLNPGDGGCSEPRIRHCTPGWATNAKLCLKGKQQQQQQQQNNYLCVWWGRVGRHTLGLIVRCASHCGLQ

SEQ ID NO: 651 - DNA, 86 bp, Homo sapiens
gatagctactgtgtgatgtccaagctggcctagaagcacagctcattcccatggcaccccacacgcttatgtcattcatcttctgc

SEQ ID NO: 652 - DNA, 189 bp, Homo sapiens
ccgggcgcggtggcgggcgcctgtagtcccagctactcgggaggctgaggcaggagaatggcgtgaacccgggaagcggagcttgcagtgagccgagattgcgccactgcagtccgcagtccggcctgggcgacagagcgagactccgtctcaaaaaaaaaaaaaaaaaaaaaaaaaataggagacaag

SEQ ID NO: 653 - DNA, 830 bp, Homo sapiens
cacggtggctcatgcctgtaatcccagcactttgggaggccgaggcagacagatcacgaggtcaggagatcaagaccatcctggctaacacagtgaaaccctgtctctactaaaaatacaaaaattagccgggcgtggtggtgggtgcctgtagtcccagctactcgggagcctgagacaggagaatggcgtgaacccgggaggtggagcttgcagtgagccgagattgcgccactgcactccagcctgggtgacagagcgagactccgtcaaaaaaaaaaaaaaaaagaagaaaagaaaagaaaagaaaacaggatatttattttagcttcttagttaacatcattaattttgtgtagttgagcgactcgttgactgcctcctccctgcagttttttacggtgcctccggctgtcgacaggcccactgtgagccgcaggtctgtgggtgcaagtgacaacagccgggcgggaggcggtgcactcaggcggcaggaaggtcccgagacggcgacgagaatgtggtcatgttcaggacactcgctcagggagggtcgttgtctgggattttacacgctcagcaccacctccttattctgttctcagggtatctctgctgttggagttacggtctttcggttgtgtattaggctacagctatttattaaatttgttcttgttcatattcttctttgtatataaacaaccctaaaatgggttagtcagaaaaaattactaaatgtcatttgttgtattctctctgtatttttactaacatcattcagctggaaataatttcaaaaagaaataaaatacctttcccattacaaa

SEQ ID NO: 654 - DNA, 4607 bp, Homo sapiens
agcactttgggaggccgaggcagacagatcacgaggtcaggagatcaagaccatcctggctaacacagtgaaaccctgtctctactaaaaatacaaaaattagccgggcgtggtggtgggtgcctgtagtcccagctactcgggagcctgagacaggagaatggcgtgaacccgggaggtggagcttgcagtgagccgagattgcgccactgcactccagcctgggtgacagagcgagactccgtcaaaaaaaaaaaaaaaaagaagaaaagaaaagaaaagaaaacaggatatttattttagcttcttagttaacatcattaattttgtgtagttgagcgactcgttgactgcctcctccctgcagttttttacggtgcctccggctgtcgacaggcccactgtgagccgcaggtctgtgggtgcaagtgacaacagccgggcgggaggcggtgcactcaggcggcaggaaggtcccgagacggcgacgagaatgtggtcatgttcaggacactcgctcagggagggtcgttgtctgggattttacacgctcagcaccacctccttattctgttctcagggtatctctgctgttggagttacggtctttcggttgtgtattaggctacagctatttattaaatttgttcttgttcatattcttctttgtatataaacaaccctaaaatgggttagtcagaaaaaattactaaatgtcatttgttgtattctctctgtatttttactaacatcattcagctggaaataatttcaaaaagaaataaaatacctttcccattacaaatctcttccttgcattgttgaagcagccgcataaatgaagtaggactcaggcctggggcgaggggcagagcccccatcgggtgaatgtggccagcctggagcagtgatcctgggcaggagggagggtctggggcaaggccccaagtgggaggagaactccttaggatgtgcttagagagacaaggccatgcactccccagaccctctcttggtccagtcaagactgtgccggcctcggagcaagacccagggagctggacttcggccactgcacctgggccgcggggggccaaagggctggggtgtcctctgggacacggagggagactggacagaagggagggaaggagtatgggtgcaacgggcccagcaggcctgtgagacaccctctgccctccactactctgtatgcaggagaactttgtaagtgacttttcatgaggatttaacaacgggtggtttaagctcacgccagacctagctgggaatgcctgcattccaaacccctgctgtgcccgtgggtggcgcgggttcttggcatcttgtgaggaggaaagcttgttccactgaaacgagctgatgcctcgtgtctgagagcactggcccggcagccgaggctttgggatggtgcaggcacctcttgtcctgaaagaaaacccctgtcaattaagctatgacacaggctttcattagaacttttattttattttatttcatttatttattttgagacggagtctcgctctgccacccaggctggagtgcagtggcgtgatctcggctcactgcaagctctgcctcccgggttcacgccactgtcctgcctcagcctcctcagtagctgggactacaggcgcccgccaagacgcccggctaattttttgtatttttagtagagacagggtttcaccacgttatccaggatggtctcgatctcctgacctcgtgatccgcctgcctcggcctcccaaagtgctgggattacaggcgtgagcctctgcgaccggctagaacttttaaaagcacttattgagggcgtctgtgagactggtgtacatagaagtctgatcaaaccccattcttgggatattgttataagcttggggtagacaaatgtttccctgaacagaagaaaaagccccaaccacaaaaggaagtgccgggacatttgtctgtttgagcgtcggtgcatttgctgaatctttatggccgccatggatttttgacaggaatggatgtcacgtagcccccaaagcccaggactgagcagctgagcagtgcacgccgtttctctgacagcgagaggactggcctggctcaggtccacaaccccaggcggtgtctgggaagccactcgaaggcacaggagcctactagaagccccatctgtgcacaccccaaactcgtgaaagtgccgaggcatcttctcctagaagaacaaaggaggccaagcggggagtgaaggcaacagtgtctacagtggtccgtttccaagacaaagtgccttgaatcggcttaagtcagcaaactacagaagaaacaggaggtccgaggcccctgcctggatcgccagtgcctgcttgccggcctccccttctccctcccttccccccggcccttaggtgctctcacctgaactaaagaagtttagtctaagataacagtttactagcctgcaaaatagctggctttgtctgttcttatcagcctgcccagctacttaggtcataagtcaaatacttgaagagcccctgggctgactgggattgcaatgcattgtgggctgcaacaaaatgcaacaggacacccctaaaaaaaacacctacagcccctgcccaacaaccaataggtgacgtcccagaagactgtgaccccagagtactcagcctgtgaggaacccggggagacacctgtgcactaggggataaattatttgttgaaactgtgctggctgtggctgcccatcagacacccgatcttgcaagaccatcatcaacagtctcactttcagccaggtgcagtggctcatgcctgtaatcccagcactttgggaggctgaggcaggcagatcacaaggtcaggagttcaagaccagcctgaccaacatggtgaaaccccgtctctactaaaaataaaaaaattaactgagtgtggtggtgtgcacctgtaatcccagctactcaggaggctgaggcaggagaactgcttggacccgggaagcagaggttgcagtgagccgagattacgccactgcactccagccgggtgacagagcgagactctgtctcaaaaaaaaaaaagaaagaaagaaagtctccctttcactctcctccgggtctccgagtccttcttctgggtttggacagatgagtttgtttctcaccacttgagaccaggagttccagaccagcctgggcaacatagtgagaccccgtctctatttaaaaatgaaagtaaaataaaaaataaaagaacaaaagaccacaggtcatgttgtattgaagagcggagaaagagctgttgaattctctggatggctgtttccttacggcctgtaccactggaagtcatgtcttaatccccaactggaagaaggcgctcaacccaccagcaaatctgcacgtagggaagaattttccaaatcttgaagaaataagaacccaaaaaaagcaccaaataagttacagatttccattgctcaatcaataatgatgatgataaaataatcaagaagccgggtgcggtggcagcacctgtggtcccagctactcaggaggctgaggtggggggatcacgtaagcctcggagtttgaggccagcctagaaacatagcaagatcttgtatcttaaaaaaaaatgaataaaatgttaaaaaataaaacaaaataagaaactgatgaaattcttggactttgataacggcaggaagccgcacacatacaggaagaacaaagtccagaaagagctgacggtggacgcccaagagaagaggcggcttctgcgagctctgtgtcgttaggaagggaactcggcttcatttcaaattccaaaggggctcaaacatatgaataagaccccagtctttcatgggagccccaaaagtggggctatttttctacgttttgacagctccccacaacatgaatcctgtcttctctctgcacggcagtcccacatcccacatccccagccttccttgctgctgggacgcatgcagctctgccagggagacgcaacctccccaggccggcagggcacagcaggttctgggcccacggtgaggacgagccggtgatatggagtctcctgggtgtgcagagaaagatgtttccagggaagctgagagaaggaagctcattagccagtgcagagctgggcttggaggcctttcctctagtcctgcaaggagctgggagctgtcacactgctcaccatgtccctttctgctcaaattccccaggatggattctgccccctgcactcaagaaaacacagggggccgggcgcggtggctcacgcctgttatcccagcactttgggaggccaagaaaggcggatcacgaggtcaggagatagagaccatcctggctaacacggtgaaaccccgtctctactaaaaatacaaaaaaattagccgggcgtggtggtgggtgcctgtggttccggctactcgggaggctgaggcaggagaatggcgtgaacctggtaggcggagcttgcagtgagccgagattgtgccactgcactccagcctggacgacagagcaagactccgtctcaaaaaaaaaaaaaaaaaaaaaaaa

SEQ ID NO: 655 - DNA, 100 bp, Homo sapiens
aaaattagctgggcgtggtggcgggcacctgtaatcccagctactagggaggctgaggcaggagaatcgcttgaacccaggaggcggaggttgcggtgag

SEQ ID NO: 656 - DNA, 1263 bp, Homo sapiens
acctgctgggacatgcgagtgctggtgtctggaaggagggccgggctgtgctgagctctggggggccggtccccacagctcccccgacagggcccccggggcctcctctataaatcaggggtccgtgctcccagcccgcttcgaggggtttctgcttggcgtgtgggttctaagtgcgagctgctgtgtgtggaggctcctgagcaccgggtgcccctcgcgcgtgtgggtcccggggcagcccagctgcacacaggatggtccgggggtgcgggtgggggcagagctgagcatggcgtgtacttggccacagaagtcttgctgtggtgccgctggacccctgctaggaggacagggtcccctctctcacgaagcacacggacctccagagtccctgcccctgcagtcctgggagcctgcagttggggctggagttggcctctcggagccacccaaacggagaggcccatgagaggggagctcaggggtccagcagaggctgacagagtggcctctttgtcctgttggcggcccctgctcatgcctggggcgtcctccctggagctgggggagctcagggacccccaggtctgtgtggctgcccctgccactccaggcacagcggcacggccctcactctttacctatttggaattggaggcaatgagtggcaagaacatgatgacagacacgggaggtaaaaatatgttcactggctgttccctttataaataagaagtggtgggacttgcgctgctatttttaaatagaccagagagtacactggagaaggcattgagtggttttattttaagtggtggaaaaaatgatgagaatctcctccagatgacagctccggaagtgtcgtgcctgaacccctctcacagtctggcgggcgcagagtctgtgagcggccaggaggccacctgctcgactggcccgtcctctccatgtgccagatgcagcccagcatgacactgccctcagctcaaaaacagcacagctactctgtgtgcaggaaaaaactgccagtgacttcaccaggatttgagaacggtccgtacgttcacactaagctgagacagcgcaggttagaagatagcgcggggaagtattcacacttcagatacgaccatcacggccacatggctaaggcccacaccctcccggggtgaaataactacagcagaagaatggggcgctaaccacctccacgggcattttaaataaaacccaaagttgttttgtttttttaaaaaaaaa

SEQ ID NO: 657 - DNA, 375 bp, Homo sapiens
gcatgtgtgttgggcagcaggaaagacagagtaccacatttttaatatacttgacatttgggtctagcttgaggatagcttacaagatagtgacagccagaatatatctatttatagacaaaaaagcacatacttctttaatttcaaacttgagtagaagattgatgagctcctcatttgggacctctgcagcttttttaagttctgatcctttcatacttttacaagtctgtggttctccatcttcagcatcaaaatactcatcatcagactctaaaggaaaaagacatttatttgatctgagacaatgtacattgaaaactgcatgaaacactcaaatctaaatctctaaaaagtgaaattcatttattagat

SEQ ID NO: 658 - DNA, 469 bp, Homo sapiens
ttattttattttagagacaaagtcttgctctgtcacctaggctggagtgcagtggtgcactctcagctcactgcaacctttacctcccaggttcaagcaattctcctgcctcagcctcccgagcagctgggattacaggtgcccaccaccacgcctagctaattttgtatttttagtagagatggggtttcaccgtgttgcccaggctggtcttgaactcctgacctcagatgatccacccacctcgggctcccaaagtgctgggattacaggcgtgagccaccatgcccggcctgacattcactcttaaaggatcaatctggcaaatgacagaacagagtacctgatggaagcaaagacagttaagaggctattgcaaaataatccagggaagaagattacagtgacttagacagtacagtagcagcagaaaggaagagcaatcatctgaatgcattttgaatttagg

SEQ ID NO: 659 - DNA, 507 bp, Homo sapiens
ggtgagataggtaggcaagtgtggacaaagataaaactgaaaaaccactgcaaaggttgaggtaagacaccataagccgctgaactaagacaaagtcattagtaattttaaaatgaggatgggaattaactaacagaactgataggaagtgttaacatacaacaggggagtctaagatggcttccaattttcacttagaggggtaagggtagcattacttaagatcattaatacagaaaaattaatcagatttggagtttaccaaggtttgcttttggttgtaacaatgatatatgataaaattaaatgaataaataagtgaatgcactggtgaattaatgaactgatctcagttaagaccagagtacttatttataagaaaagtaacttttctctttccttggtacatcaaactgtactctacagataacagacacaagtgagtttttcaatggctaaaaaaagcctaacttttgaccttatatatgtcgactaaagaaaataaaa

SEQ ID NO: 660 - DNA, 447 bp, Homo sapiens
gaaaaaagcatgattatataaataaaagaaaaaagcaatgactactaaaatagaatataaaacaataaagaaaacctgtagtaaactaagaaattgttgagaaaaatattattggtattttcaaaaggcaaaattgaagtggcagtattaaaaaagggttgttgcacactgtgtatatttaaaaggcaaattagaaaaatggcttaattacctatgtagcttattcctgcagaagaaacatacctcaaaaatagaatgggtcaactcatggttaataaatacatcaggagaaacaggacattccagcaatgaaagaaacatcattaaggaaacaattgaggacaaacatcctgactaatgaaaagcccaattctttgatatcacacacagctcaattcaggaatgatattccaaaaaataatcaaagtgcctttagaactattaccc

SEQ ID NO: 661 - DNA, 440 bp, Homo sapiens
gaaaaaagcatgattatataaataaaagaaaaaagcaatgactactaaaatagaatataaaacaataaagaaaatctgtagtaaactaagaaattgttgagaaaaatattattggtattttcaaaaggcaaaattgaagtggcagtattaaaaaagggttgttgcacattgtgtatatttaaaaggcaaattagaaaaatggcttaattacctatgtagcttattcctgcagaagaaacatacctcaaaaatagaatgagtcaactcatggctaataaatacatcaggagaaacaggacattccagcaatgaaagaaccatcattaaggaaacaattgaggacaaacatcctgactaatgaaaagcccaattctttgataccgcacacagctcaattcaggaatgatattccaaaaaataatcaaagtgcctttagaact

SEQ ID NO: 662 - DNA, 652 bp, Homo sapiens
ctgatttttactttgttcccatttataattcaaatataatataaacgtcttattcatttagtcttcagcattttaagtattcgacacgaacattaaagatttggtgttgaatttaataaattacaccaaaaagtctcagtagccaattcactaacatcttttgatttggtaatcttcacagaatcaacaactgttaacacttctgtgcaaataaatttcagttgtgcttatatattataatattcactttaggaatccacctgtcaatttgcaattcaattataaggtatattttaagtgatatctatgtattgtatacacatattccattgaaaggtgagaataattagaaagtagtaatataaaaatgtgtatgaaataagaactttcttaaaagacctagtttagctaaatatatgacaatataaaatgtctgcccaatgtttgattatactttgtctaatgacctttaaatttaactgaaattaaaaccgtacttttgcagttgatatttttgtgttccctttgttaacataccaagcactaattattgacttcaaggaagccacgtattgcaagtcattgcttagcctttcacatctgagtgttgataagatgacggaatgggtagtcttgtagtaattgcttatgg

SEQ ID NO: 663 - DNA, 652 bp, Homo sapiens
ctgatttttactttgttcccatttataattcaaatataatataaacgtcttattcatttagtcttcagcattttaagtattcgacacgaacattaaagatttggtgttgaatttaataaattacaccaaaaagtctcagtagccaattcactaacatcttttgatttggtaatcttcacagaatcaacaactgttaacacttctgtgcaaataaatttcagttgtgcttatatattataatattcactttaggaatccacctgtcaatttgcaattcaattataaggtatattttaagtgatatctatgtattgtatacacatattccattgaaaggtgagaataattagaaagtagtaatataaaaatgtgtatgaaataagaactttcttaaaagacctagtttagctaaatatatgacaatataaaatgtctgcccaatgttttattatactttgtctaatgacctttaaatttaactgaaattaaaaccgtacttttgcagttgatatttttgtgttccctttgttaacataccaagcactaattattgacttcaaggaagccacgtattgcaagtcattgcttagcctttcacatctgagtgttgataagatgacggaatgggtagtcttgtagtaattgcttatgg

SEQ ID NO: 664 - DNA, 652 bp, Homo sapiens; identical to SEQ ID NO: 662

SEQ ID NO: 665 - DNA, 4941 bp, Homo sapiens
cgataatatgagcatgcacagtatttgatattgctctgtaggaaaaaagagacttcatttttttcatcttctgcctatgaatacaaattgattctttttttttttttttttttttgagacagagtctcactctgttaccaggctggagtgcagtggtgtgatctcagctcactgcaacctctgcctcccaggttcaagcagttctcctgcctcagcctcccaagtagctgggactacaggtacacgccaccacgcccagctaatttttgtatttttagtagagacgggatttcaccatgttggccaggagggtctcgatttcctgacctcgcgatccgcccacctcagccttccaaagtgctgggattacaggcgtgagccaccgcgcccagccaatttttttttttttttttttgagacagagtctcgcttttgtcgcccagtctggagtgtagtggcatgatctctgcaacctctgcctcctcggttcaggcgattcttctgccttagcctcccaagtagctgggattacaggcaccggccaccacacccagctaatttttgtatttttagtagagatggggtttcaccatgttggccaggctggtctcaaaatcctgacttcaggtgatccacccactttggcctcccaaagtgctgggattacaggcgtgagccaccacacctggtccaattcatcataattctgaatataatttaataattttaaaatggtcgcaatggcattgccatttggagtatgggaaaatgcagttggttaattcattgaacagattagtaaagtcagaagtctttttcataacatacggtcacaattcctttcttttaattaaagacaaaaggtttatgggttttggtttgtttgttttagatatggggttttgctatgtcacccttgctggagggcggtggctgttcacaggcgtgggtcatagagcactgcagcctggaactcctgggttcaagctctcctcctgcctcagcctcctgagcagcttggactaaaggtgtgcaccaccgcacctggctgagaggcttctgtttttcatgttccctttatcaaaacaaaatcacgcctaaacatactctctgtgtgaaatcttgattttagttcaacctaagaaatataataaatataaacctgtttcttgcttagtgtttattgaaggcaggaacgtatgctgaattaaagtaattttactacgaagtttgcttattaagtatgcctggtacagtcttcatggaagttattaagtattttaaggaaaaaaataggctaaatggcatatagcctgcttaaataaaataattctatttttttaaaaagctcccaattgtcattgttatttaccagtcaatctttcaacaagtatcaattattggatgtaaattaaagtaaaattgcttaatatttaagctaagaatacaggaaggactatgagcattgaggaaatcgggggaggccagaatggcatcaagctggaaaagaaattaaaacattaccttcgatgagactttacctagcaagaaggtaattattttgaataacagcaatagagaatcttttattttgaattgagaagaaattctgatgattagagtgtcagtaagtagtaggaaaaggtaagaatacatgtgtttctaatctcccaccaccacctgttgtatggaacaaattggattactagcaagggtaaggtttattgacaatgagaagttttagtccaagattttagttaaaatattttaaaattttttgattcataaccaagaagttgcctcagatcactgtgaagctttaaaatgcaggtgcctttgctcctcctccctccaggcccccgggggcagagccctggctggtgtctcttcaggaggacccctgacacaccgattctgccctcacaatcactgccttaaagcaggcagcagaatcttttggagaactaacaagattctgatgctgatgcatagggcctggggtggggcctcagattctgctttttttttctttttttttttttttttttttagacagggtctctttctttttcctttctcactcaggctgcagtgagtggcgtgatcttggctcactgcaacctccacctcctgggctcaaacgatcctcccgcctcagcctcctgagtagctgggactataggcgcaagtctatgcaaccacccagctaatttttgtatttttagaagagtgggggttttgccacgttgcctgggctggtctcgaactcctgacctcaagtgatccaaccacctcagcctcccaaagtgctggaattacaggcatgagccactgcacccagccaagaatgtccacttctgacaagctcccaggtgatgcctatgctgctggtacagtgaacaacatgctgagaggcattgctccaggatactgcatgtagtgagcagttctttagcgtttatgtgtcatatacttcaagttacatgaaaaagatcaactgaaattatgttcttacacagaatagttttcatctagttttattatgtttttacaggctgtttacaagaacaaaaatagagaatttttgaacatatttttctgaaaacataaaaactagaatactctttaattctaaattatagatttgtagcatacttagtaaacttagtaaccaattttcatttgtaaaagattagctatcaaatggacatttatttctcttagttttcttatgacatgacttgccttatatcctttgtcctttttctgtaacttgtcagcctctggagaaataggattttacatttttgcaaatgagttgccaatgaattaagatcaaaacgtcattattaaggagtatgaagcattatttactggctctcagataacagaaaacccaaaagggatggtggcggagtgaagaaagccttgccttgggaaaaatacttcaaatgctcccatagttttttttcctcaagcccagtcagtatccttcaaggataactttttcataccttttttttggtttgtttgtttctgctagctttatgacagaggttataatattcttttctcctctcttctttgacgtgttacgttgtctttttttttttttttttaacttcttcatactcttaaaaagctccagaatggccaggcgcagtggctcacgcctataatcccagcactttgggaggccaaggcaggcggatcacgaggtcaggagatcaagaccatcctggctgacacggtgaaaccccgtctctactaaaaatacaaaaacttagccaggcgtggtggcgggcgcctgtagtcccaggtactcgggagtctgaggagtgaacccgggaggtggaggttgcagtgagctgagatcgcaccgctgcactccagcctgggcgacagagcgagcctccatctcaaaaaaaaaaaaaaaaaaaaaaaaatctccagggttctgttgaattcaccaaaatggggtcagctctggtgagcctatgtaatactcgagaacattaatataaacccatagctctttactgggcttccatttaaagggaagtcctaagaatgaaatggcaccagcatcctgtttccatccaagacaagaccacacgtgttcaggtgccatgtattcatatagctctcaactgattggtgatttgcactttgtgcatctaattattaaaatgaaactctctacaggtgagctgaagtaacatacttcatatttaaaaagttcacagcaatttgaccatagaaaactttctcatctgaaatcagggtaagtttttttaatgtaagcagagaaaaaaataaagcagtgttttatttcaaatttcagtaagttcaggtgggcctaattaagacatgactattattacaaatcctattcttgccagaagttacttagatagattagtgattagattttaaaaacattattttcctttcttgaataaggaaaattgtgcatctcaaagagaaaagtaaatatggaaatatgttcatagttcagttgcataaaatagacacattaagtcaagtgatttgaatgcttagtgtcttttggtaaacagcattttgtcaacaaacttttcatatggctatagaatcttgttttttccaaataaaaactttgcaattgggagttattcctccattcagcacactttttaatgttaagactaggggaaacttgtgggtatatattcagtggttttcaggattttcttttatgttctagaaaagtaatttttcctttcctagttttaagtatatattcaagcaaatcgttgattcctatacagccattggattatcaccaacacatttggtatatacagtgggccgataatgacaaactaaagtttgtggttaatacctactctataccagacactgttctaaggatccgacatatttaatcctctgtttaccctctgtttctgtgcctgatttacagacagagacagaggcacagagaggttaaatgacttgtcaaaggtcttatgatgtgtggcagagcctgggtttttagctcaaacccctctcagtgaagaaagccttctgtgtaggcaatttcatctaataccttcatgaattgttacttcagacgagaattctcacttattctttttttttttttttttttcttttctttgagacagccttgctctgtctcccaggctggagtgcagtggcgcaatctcagctcactgcaagctccgcctcccgggttatgccattctcctgcctcagccttccgagtagctcggactacaggcgcccgccacctcgcccagctaattttttgtatttttagtagagacggggtttcaccgtgttagccaggatggtctcgatctcctgacctcatgatccacccgcctcggcctcccaaagtgctgggattacaggcgtgagccaccgcgcccggcc

SEQ ID NO: 666 - DNA, 308 bp, Homo sapiens
ttctttttttttttttttttttttttctttgagacagccttgctctgtctcccaggctggagtgcagtggcgcaatctcagctcactgcaagctccgcctcccgggttatgccattctcctgcctcagccttccgagtagctcggactacaggcgcccgccacctcgcccagctaattttttgtatttttagtagagacggggtttcaccgtgttagccaggatggtctcgatctcctgacctcatgatccacccgcctcggcctcccaaagtgctgggattacaggcgtgagccaccgcgcccggcc

SEQ ID NO: 667 - DNA, 271 bp, Homo sapiens
agccttgctctgtctcccaggctggagtgcagtggcgcaatctcagctcactgcaagctccgcctcccgggttatgccattctcctgcctcagccttccgagtagctcggactacaggcgcccgccacctcgcccagctaattttttgtatttttagtagagacggggtttcaccgtgttagccaggatggtctcgatctcctgacctcatgatccacccgcctcggcctcccaaagtgctgggattacaggcgtgagccaccgcgcccgg

SEQ ID NO: 668 - DNA, 402 bp, Homo sapiens
ttctccagctctccttctggcttcatcctgtcttccacggctctcctgtcccacctattctccctgccggtgcccaagttttagccttcactgccttcccctagaacacgccagggatattgcattctgtcctcactgtcttgaggatcttcctccccggctcatcactccccatgggcagctgccagggtaggcgctgtcaccttctgttgacaacagtcagtagctcctaaggactaaaactgttcagcccagcattcagctctttggaggagtccatctgtcccccagcacatccaggagtaaggattccgactggtccactcctcatcctggtgtcttcagcttctctgctgccatgttctttgctgggatggctgcttcccaactccacctccagaa

SEQ ID NO: 669 - DNA, 248 bp, Homo sapiens
ggtgggcagatcactcaaggtcaggagttccagatcagcctggccaacatggtgaaaccctgtctctactaaaaatacaaaaattagccaggtgtggtggtgcacacctgtaatcccagctacttgggaggccgaggcaggagaatctcttgaacctcggaggcggaggttgcagtgagccaagatcatgccactgcactccagcctgggcggcagagcaagactctgtatcagaaaaaaaaaaaaaa

SEQ ID NO: 670 - DNA, 1609 bp, Homo sapiens
ggatattcctccaagcccagctcgaatgcttgatctgcctggagccttcctggtcatccttgggtgacctggagctggtgctgttagagcacttctgctctgccctgatgtgcagttgttgtgaatgggccactccatagtttatccttcctcacacccctggggcatagtaccctattcaagtttgtccaatgagtgcatgggtgaattaatgaatgaatgaacaaatgagtctttgccctagacaacttaaggtcctcactctgcattaggagcctccatttttctccagatggttgaaataaccagcctctgaaggagccaatggtttggtcactgctctctcagcaaattacagtcactgtcacttagcatggagagtggacgttgcacatcactgtgaaaccttgcagaggaggagagggcaggttcatcagaagaaagaaaggacaaaatgactccttatgaagcattttgtgccttctgtgagaaaacatgtatttagatcagataaactctagtcaaaatacaaaaaggaaaaatgaaagacctctgaaataggaacaatctcttgaagaggcaaatgactcaaaactgctcagtggctctttcagaaaatctaagtaaagttccctgacaacagaaactgaagagattgcctggttcatcttgtagtcttccaaaacagcagataatttctgaatctcagatgttgaatcagtgcaacgggatggatttcttgttcctaagtgttaaatgatcacatacataaaagagtctgagcctgagcaacataatgagaccctgtctctacaaaaaaaaaaaaaagattagccaggcgtggtggtgcacactgatagtcccagctactcaggaggctgagggaggcggatcacttgagctagagagttcaaagctgcagtgagccatgtttgtgccactgcactccagcctgggcaacaaagtgagaccctgtctggaaaaaaaaaaaaaaaaagcgtctgcataattcctggtgcattttgtggatatacaatatgagtatgtgttccatgttttcagaaattcaaaggaagcgtttccacaatatgtgacggtttatttcccaagagatgaaaagattcattaaggtgcatgctttgatttaacatctgcaaacatttaaaaaatataacagtgtgtgacgtagcagtgagagtactatctttttttaaaaagggaaattaagatttatttctggccaatgtgaacagaaataagtcactttatctcactgagcaccaattttacacgtggaaaatagaagaattggaccaaatcagcagtttcaagctgagttgcaaaagttcatggaaccatttcagtcgcttcatggaatcggggtaggcatgaggcccgttgttctttcaacctgagccgcatggctcttgtgtctttaaaccttgtggtaggatttttttttttttctgctttaataagtgaagggtcagggcaccagttggtgtctgagatgccctccagtctggggaaccccgtagatgcttagactactttgaactgaagtatgtgcagtctgccatctcacattaaaatgtaggcattttgtcaa

SEQ ID NO: 671 - DNA, 7337 bp, Homo sapiens
gtgtgcctggatgattgatagcttcggaaatgaggaacagaggcacaaattttgcccaccgctctgtaccatggagaagtttgcttcctactgcctcactgaaccaggtgaatttgccacactgcactgagatatagcagggagagatgcttcctgctcagatggcattaccgagcactccttccagcctcttgacatgtcgagccactgtttatctagctgtttggttgaggagtaatagagtcctgtgacctgatgtcacaaggaccaagaagctatctggtgtgttgggaggtaggcagtggcctgactggtatgagcagtttccaccaagtacagagagttcctttggccacttgggttttgcagtgacacactctgagcagggtctgtttagagaagatttcctagaagatagaattgtgctgggctccctcgacctcactgactttctcaccttctctctgctgccttttgatccctcctcaggaagtgggagtgatgctgcctctcttctgacctccgctaagaaacagggagatcattacatcctcaatggctccaaggtactagcgtgcgtcctcccagagcactttggagattgttcccagcttcctcctgacatcctctggttccttcacatccgcgggttaatactcccataggatttttatgtgttgggaagagaacctctgacccatttctctttctttattctcactgtttgtatctctcctaatctgattccagatcatttcgttgacttttgtctatcctttttatactctcttggactgcctctctgatctgcagtcactgcagcgaccttttacctcacctcagtctctgtgccattggaccttattgtcagtctctgtgccattggaccttattgtcagtctctgtgccattggaccttattgtcagtctctgtgccattggaccttattgtcagtctctgtgccattggaccttattgtcagtctctgtgccattggaccttattgtcaggaggacccagtggtgttcccagacgctgtgagaactcaagcattccctggtccttttgcaccccttttacccccacaggccttcatcagtggtgctggtgagtcagacatctatgtggtcatgtgccgaacaggaggaccaggccccaagggcatctcatgcatagttgttgagaaggggacccctggcctcagctttggcaagaaggagaaaaaggtgagtggctgttggacaggaaacaattcaggttatgagactctgccacctgccagcccaactcctgctctatttcagaaaacaggtttgcatacttgctaacctacctttgaagcagttgcttctattaggattttcaacaggagcatatgaaatacaacagggcattattaaacactaggcctctggggaaagtgacaatgtttgccagtaaattcttcaagccacctgtgagtgttctgacctctcctgcctctgcttttggcctgtgttccttatccagctgcttacgttggtgcactttgttgctccaggaagagacgcttagagaagacctggtgttggccacaagtctcagtaatggaaggcgtgtggtcccttttgcttctttgattaaaaataaagtaaaactcattggagatgattgtgggtatttcagcaacccaagaaggacacttaggtactgtaagtaatttgaaaagtaagatacttctaggattaagagccgccatggccagggcatgaacaggagacctgtgatcatgtaaccgtaattggtaataagggctcaagacccattcagattttttagaccagatgctcaaagcagtcatctctctctagtttgtactgttatggggggactttgtgagagaaggcaggtaatgaaatgacccctaagtgtacctctttctcacagctcctcgggtttctgtattttcctacaggatccttcctgatcctctgtaactgtaaggcattatgcattttagcatccccttctctttggtaacacagcaaccatttcctaggcttctactgtgtgtgaagcccatgctaactcctgggcaggaagaccttcagtaaaaggcttagaaatggagtttatcctatcaacaaaagagagcaaggaaatgatgtaaaggcagtctattttcagagccagagaggaactgggagattgtagatagtttgtggttttcaattagaggcactgaaattgggggcagttggtgtcacaatcctaaaagaagttgtgagaagtgtttgtaggttagtcaggtagagtagacattagtagattctcttaataagttagaaaatgtttagctgaaacaggtatctttctgagtgctgacaggcctttaaacctgaactttttctttttcctcattttaagttcttgtgggtctaagtcttgggtgctgaaacccatacctcacaggctcccgtccccagggaaggccgccctacctgctggattgttgggcaaccacgcagtccctgatttttgccaggtggggtggaactcccagccaacacgagctgtgatcttcgaagactgtgctgtccctgtggccaacagaattgggagcgaggggcagggcttcctcattgccgtgagaggactgaacggagggaggatcaatattggtgagatacgcaggggtgtggcagggaggtagcggtccgggacaggcactgctgttttccagcttggttggaacgtcggcgctcttcccctctagcttcctgctccctgggggctgcccacgcctctgtcatcctcacccgagaccacctcaatgtccggaagcagtttggagagcctctggccagtaaccaggtaacctctgccttgcctccacatggctttgcactatttgcagcccgggacctgctctagggcccacatttccaggagagaagccaggaaattcctctgtcagtcccaccactgtcctagccagagcttgtgctttatttctgtccatcttttcttgggatatctttaacgatattaaagtgtcgggtgagtgaagtggacttagcacttaaaagcaataaatttcctctatagaaaaagcaagagactttgaagctttggatcacttagaaaaggcgcctccgagatgtcttaccgaggctcctgcaccaggtgctggtctaagcccctcagtcttgtctggttctctgctccctgtgctgcagtacttgcaattcacactggctgatatggcaacaaggctggtggccgcgcggctgatggtccgcaatgcagcagtggctctgcaggaggagaggaaggatgcagtggccttgtgctccatggccaagctctttgctacagatgaatgctttgccgtaagtgattcctctggctctcctgggatggacagggaacagctgctaggcccaggggtcttgagagacatgagtcagatttggaacccagccctcctggaatcccacaaggatcaccttaagcttaaggatataaatgaactcatgagcggcctatgtgggagctctcatcgctggcttttaggcctgctgcatgccattatacacttcattatgtcactgttgtttggttgtgttctaggcgagaaaccacctttggaaggttcacagcagccccaatttagcactctgccatgtttacattgtcaggctgcattgccactagggggaaccatagctttttatcatcccagccagggtggctgtgggcagcttctgcctggcaggtaataagggagaggggcagagggctttgagtcgcctgtctggggggaactgacaagtttagtaggtgaacttcccttgtctctaaccatacagaatgtggaggccctctttgagcttggctgtttgtggttctttcatgggtttatggcgggctgccagatcgtgggctggggtaggaagggaagctgcttgctccacagtcttcccagagtccaagacgtctagtccctgtctccctgcagatctgcaaccaggccttgcagatgcacgggggctacggctacctgaaggattacgctgttcagcagtacgtgcgggactccagggtccaccagattctagaaggtaaaaattgccagaggttattctcttcccttcagaacggggacgggatcgctgctttccccactctctgtccccatgcctcctgggcctcagggtgcagtcaagccctgtctgtctcgaggcttcctcctccctcccgttccacagagctgttctggcaggggcctggagtccagagccgcagcttcgtccctttcggggggcctcagatcgctctgctgctgcccttttcctctggagatctgcgagaagggtgaactgagataatggatgagaaagcatgttgaaaaccacagccggggcttttctctaaggttatcgagtacgtggttctcagggatccaagaacagtgatggacaaggcaaatgtgagccagtatggtcatcagtagctctatattgattatcagccagatggcctaaaagatacctgtctcaatattactagtgtatttttcaataaaataaaccatcactatatgggtatcttcttggtagtcacagacattctatcgaggaaacatggaagccgttggggtcgggctcggagcctggctgtctccactctctacagccagtgcggaagtcttgaaatgacacgactcttggaaaagcaggaggggcagaggcttctttgagtgacttcggtgaagcaacgtgaggctgccttgctggaaacattatataatggggcttccctgcccctttcacagcacccttctcaaacctcagcctgtgctggaatcgcctggagggcatgggagcgcagattgcgggcctcaaccccagagcttctgctccagagggtctagtgtgggcctgggaatttgtatctgcaacaagtcttcaagtgaggctgccacagcttgtctgagaaccacactttgagacccaccgctctggtgttaatgtcagagtcacaggctaccacaggttagaccgctgctttcttctgcaaacctcattccagaaagatgtttatgggctcagtcgccagtgttcaaactgaattcccgagagtcgttttccttccattactcttggaattgctttctcactgagctttatgtgcgtaggaaacttcgccttcattctaactctctctccaccctgcaataataagcaggaaaacatttattgtaggccacaccatcacccacttacagaagaattggggcactcatcactgtatcactttgtttcatcatggactttactgttggataaatctacagtttatgctttatttgagacgatgtgactactgattcctcgagggggtttatatttctttttgcattaaaggccactgctaaaaatgaagcaaataattgataccctcctttcagggaaaatgttttcattcttttgtaagtcagttttctgattaccaaagaaatgtgtatttattgttgaaaccttataaaattaggaaaagtaggctgggtgcggtagcttatgtctataatcgccgcactttgggaggctgaggcgggtggatcgcgtgaggccaggagttcgagaccagcttggccaacccggtgaagccccgactgtctaaaattataaaaagttagctgggcgtggtggtgcatgcctggaatcccagctactcgagaggctgaggcaggaagatcgcttgaacccaggaggtggaggttgcagtgagctgagattgcaccatcgcactccagcctgggtgacagtgagactccatctaaaaacaatacaaaaaattagccgggcctggtggggcctggtggcacatgcttgtggtcccagctactcaggaggctgaggcaagagaattgcttgaacctggggggcggaggttgcagtgagccaagatcacaccactgcactccagcctgggcgacagcaagactgtctcaaaagaaaagtaaaagaaaaaaaatcactcatgtttctacatccagaatgttattttggtacatctccttttaggcattttactctgcctttgttggtacatttttaattttaattagaattatcctgtatatactgtttttattctgcctttttaaactttatataagcatttttaccatcagaagaagtttttaaaaaagtattatttcctgacatttttcagtactttgtagagaagtctctgataatctcatctctcccaggctaaaagcaatgattgtagtttaaatctgcagctactctgaactaggcctggagcagcctggtcagagctttactaaactctcagactttgctgctgtgaaattcttcctccttcctccctcttacaggtagcaatgaagtgatgaggatactgatctctagaagcctgcttcaggagtagaacccacacttgttctggcctggtgttcagtgcgactgcagtcagtgttgagtggtgccatgtgggccgctctattccaaaggaatcatggattagacccaagggctgagctcctctagggcaggacctgcaccctgtgtgttggcaccagcatcgggtcttggactggggcagaatccccagtggaaccggaagagctggactgatgagaaacatcagaagaacacatactaccttgttttcctaatgccagaagggtgaccagtgaagattcaccgtcaaaccatgaaagtcctttcttggatccactttatcttgattagtctgcattttactagttcactggatccctcctctaggggcctggggactttcactgatgctcttcctgattctagagcaaaggtgtgggaaggggaaatggaggaatgccctcctgtctgtgtcgttctctgtgccacagctacagatgcagaaggtttctctggatagcacacctctgaatgtaaatcatgataaaatggatatttggaaacttactcctaagctgtgatttagggtgtatttctacttctggactgcctcaatatcaagggctgagacttttgaattttgaatattcgttgggtttcatgttaagaagcctgtggtctaggagtgctattcagtgtttcttttcctgataaacactttgaatattttttttgtgtttttgtttccttttctgaagctgttcctccttttaaatatttttaatcacattgataaaatctatccttcaccacctctggttctactatagttgatttttattttaaatgtttaattgtatttgattaaacacttaactggattttggaataataaaactctcgtccaatttggcttttaaaaa

SEQ ID NO: 672 - DNA, 7366 bp, Homo sapiens
gtgtgcctggatgattgatagcttcggaaatgaggaacagaggcacaaattttgcccaccgctctgtaccatggagaagtttgcttcctactgcctcactgaaccaggtgaatttgccacactgcactgagatatagcagggagagatgcttcctgctcagatggcattaccgagcactccttccagcctcttgacatgtcgagccactgtttatctagctgtttggttgaggagtaatagagtcctgtgacctgatgtcacaaggaccaagaagcctatctggtgtgttgggaggtaggcagtggcctgactggtatgagcagtttccaccaagtacagagagttcctttggccacttgggttttgcagtgacacactctgagcagggtctgtttagagaagatttcctagaagatagaattgtgctgggctccctcgacctcactgactttctcaccttctctctgctgccttttgatccctcctcaggaagtgggagtgatgctgcctctcttctgacctccgctaagaaacagggagatcattacatcctcaatggctccaaggtactagcgtgcgtcctcccagagcactttggagattgttcccagcttcctcctgacatcctctggttccttcacatccgcgggttaatactcccataggatttttatgtgttgggaagagaacctctgacccatttctctttctttattctcactgtttgtatctctcctaatctgattccagatcatttcgttgacttttgtctatcctttttatactctcttggactgcctctctgatctgcagtcactgcagcgaccttttacctcacctcagtctctgtgccattggaccttattgtcagtctctgtgccattggaccttattgtcagtctctgtgccattggaccttattgtcagtctctgtgccattggaccttattgtcagtctctgtgccattggaccttattgtcagtctctgtgccattggaccttattgtcagtctctgtgccattggaccttattgtcaggaggacccagtggtgttcccagacgctgtgagaactcaagcattccctggtccttttgcaccccttttacccccacaggccttcatcagtggtgctggtgagtcagacatctatgtggtcatgtgccgaacaggaggaccaggccccaagggcatctcatgcatagttgttgagaaggggacccctggcctcagctttggcaagaaggagaaaaaggtgagtggctgttggacaggaaacaattcaggttatgagactctgccacctgccagcccaactcctgctctatttcagaaaacaggtttgcatacttgctaacctacctttgaagcagttgcttctattaggattttcaacaggagcatatgaaatacaacagggcattattaaacactaggcctctggggaaagtgacaatgtttgccagtaaattcttcaagccacctgtgagtgttctgacctctcctgcctctgcttttggcctgtgttccttatccagctgcttacgttggtgcactttgttgctccaggaagagacgcttagagaagacctggtgttggccacaagtctcagtaatggaaggcgtgtggtcccttttgcttctttgattaaaaataaagtaaaactcattggagatgattgtgggtatttcagcaacccaagaaggacacttaggtactgtaagtaatttgaaaagtaagatacttctaggattaagagccgccatggccagggcatgaacaggagacttgtgatcatgtaaccgtaattggtaataagggctcaagacccattcagattttttagaccagatgctcaaagcagtcatctctctctagtttgtactgttatggggggactttgtgagagaaggcaggtaatgaaatgacccctaagtgtacctctttctcacagctcctcgggtttctgtattttcctacaggatccttcctgatcctctgtaactgtaaggcattatgcattttagcatccccttctctttggtaacacagcaaccatttcctaggcttctactgtgtgtgaagcccatgctaactcctgggcaggaagaccttcagtaaaaggcttagaaatggagtttatcctatcaacaaaagagagcaaggaaatgatgtaaaggcagtctattttcagagccagagaggaactgggagattgtagatagtttgtggttttcaattagaggcactgaaattgggggcagttggtgtcacaatcctaaaagaagttgtgagaagtgtttgtaggttagtcaggtagagtagacattagtagattctcttaataagttagaaaatgtttagctgaaacaggtatctttctgagtgctgacaggcctttaaacctgaactttttctttttcctcattttaagttcttgtgggtctaagtcttgggtgctgaaacccatacctcacaggctcccgtccccagggaaggccgccctacctgctggattgttgggcaaccacgcagtccctgatttttgccaggtggggtggaactcccagccaacacgagctgtgatcttcgaagactgtgctgtccctgtggccaacagaattgggagcgaggggcagggcttcctcattgccgtgagaggactgaacggagggaggatcaatattggtgagatacgcaggggtgtggcagggaggtagcggtccgggacaggcactgctgttttccagcttggttggaacgtcggcgctcttcccctctagcttcctgctccctgggggctgcccacgcctctgtcatcctcacccgagaccacctcaatgtccggaagcagtttggagagcctctggccagtaaccaggtaacctctgccttgcctccacatggctttgcactatttgcagcccgggacctgctctagggcccacatttccaggagagaagccaggaaattcctctgtcagtcccaccactgtcctagccagagcttgtgctttatttctgtccatcttttcttgggatatctttaacgatattaaagtgtcgggtgagtgaagtggacttagcacttaaaagcaataaatttcctctatagaaaaagcaagagactttgaagctttggatcacttagaaaaggcgcctccgagatgtcttaccgaggctcctgcaccaggtgctggtctaagcccctcagtcttgtctggttctctgctccctgtgctgcagtacttgcaattcacactggctgatatggcaacaaggctggtggccgcgcggctgatggtccgcaatgcagcagtggctctgcaggaggagaggaaggatgcagtggccttgtgctccatggccaagctctttgctacagatgaatgctttgccgtaagtgattcctctggctctcctgggatggacagggaacagctgctaggcccaggggtcttgagagacatgagtcagatttggaacccagccctcctggaatcccacaaggatcaccttaagcttaaggatataaatgaactcatgagcggcctatgtgggagctctcatcgctggcttttaggcctgctgcatgccattatacacttcattatgtcactgttgtttggttgtgttctaggcgagaaaccacctttggaaggttcacagcagccccaatttagcactctgccatgtttacattgtcaggctgcattgccactagggggaaccatagctttttatcatcccagccagggtggctgtgggcagcttctgcctggcaggtaataagggagaggggcagagggctttgagtcgcctgtctggggggaactgacaagtttagtaggtgaacttcccttgtctctaaccatacagaatgtggaggccctctttgagcttggctgtttgtggttctttcatgggtttatggcgggctgccagatcgtgggctggggtaggaagggaagctgcttgctccacagtcttcccagagtccaagacgtctagtccctgtctccctgcagatctgcaaccaggccttgcagatgcacgggggctacggctacctgaaggattacgctgttcagcagtacgtgcgggactccagggtccaccagattctagaaggtaaaaattgccagaggttattctcttcccttcagaacgggggcgggatcgctgctttccccactctctgtccccatgcctcctgggcctcagggtgcagtcaagccctgtctgtctcgaggcttcctcctccctcccgttccgcagagctgttctggcaggggcctggagtccagagccgcagcttcgtccctttcggggggcctcagatcgctctgctgctgcccttttcctctggagatctgcgagaagggtgaactgagataatggatgagaaagcatgttgaaaaccacagccggggcttttctctaaggttatcgagtacgtggttctcagggatccaagaacagtgatggacaaggcaaatgtgagccagtatggtcatcagtagctctatattgattatcagccagatggcctaaaagatacctgtctcaatattactagtgtatttttcaataaaataaaccatcactatatgggtatcttcttggtagtcacagacattctatcgaggaaacatggaagccgttggggtcgggctcggagcctggctgtctccactctctacagccagtgcggaagtcttgaaatgacacgactcttggaaaagcaggaggggcagaggcttctttgagtgacttcggtgaagcaacgtgaggctgccttgctggaaacattatataatggggcttccctgcccctttcacagcacccttctcaaacctcagcctgtgctggaatcgcctggagggcatgggagcgcagattgcgggcctcaaccccagagcttctgctccagagggtctagtgtgggcctgggaatttgtatctgcaacaagtcttcaagtgaggctgccacagcttgtctgagaaccacactttgagacccaccgctctggtgttaatgtcagagtcacaggctaccacaggttagaccgctgctttcttctgcaaacctcattccagaaagatgtttatgggctcagtcgccagtgttcaaactgaattcccgagagtcgttttccttccattactcttggaattgctttctcactgagctttatgtgcgtaggaaacttcgccttcattctaactctctctccaccctgcaataataagcaggaaaacatttattgtaggccacaccatcacccacttacagaagaattggggcactcatcactgtatcactttgtttcatcatggactttactgttggataaatctacagtttatgctttatttgagacgatgtgactactgattcctcgagggggtttatatttctttttgcattaaaggccactgctaaaaatgaagcaaataattgataccctcctttcagggaaaatgttttcattcttttgtaagtcagttttctgattaccaaagaaatgtgtatttattgttgaaaccttataaaattaggaaaagtaggctgggtgcggtagcttatgtctataatcgccgcactttgggaggctgaggcgggtggatcgcgtgaggccaggagttcgagaccagcttggccaacccggtgaagccccgactgtctaaaattataaaaagttagctgggcgtggtggtgcatgcctggaatcccagctactcgagaggctgaggcaggaagatcgcttgaacccaggaggtggaggttgcagtgagctgagattgcaccatcgcactccagcctgggtgacagtgagactccatctaaaaacaatacaaaaaattagccgggcctggtggggcctggtggcacatgcttgtggtcccagctactcaggaggctgaggcaagagaattgcttgaacctggggggcggaggttgcagtgagccaagatcacaccactgcactccagcctgggcgacagcaagactgtctcaaaagaaaagtaaaagaaaaaaaatcactcatgtttctacatccagaatgttattttggtacatctccttttaggcattttactctgcctttgttggtacatttttaattttaattagaattatcctgtatatactgtttttattctgcctttttaaactttatataagcatttttaccatcagaagaagtttttaaaaaagtattatttcctgacatttttcagtactttgtagagaagtctctgataatctcatctctcccaggctaaaagcaatgattgtagtttaaatctgcagctactctgaactaggcctggagcagcctggtcagagctttactaaactctcagactttgctgctgtgaaattcttcctccttcctccctcttacaggtagcaatgaagtgatgaggatactgatctctagaagcctgcttcaggagtagaacccacacttgttctggcctggtgttcagtgcgactgcagtcagtgttgagtggtgccatgtgggccgctctattccaaaggaatcatggattagacccaagggctgagctcctctagggcaggacctgcaccctgtgtgttggcaccagcatcgggtcttggactggggcagaatccccagtggaaccggaagagctggactgatgagaaacatcagaagaacacatactaccttgttttcctaatgccagaagggtgaccagtgaagattcaccgtcaaaccatgaaagtcctttcttggatccactttatcttgattagtctgcattttactagttcactggatccctcctctaggggcctggggactttcactgatgctcttcctgattctagagcaaaggtgtgggaaggggaaatggaggaatgccctcctgtctgtgtcgttctctgtgccacagctacagatgcagaaggtttctctggatagcacacctctgaatgtaaatcatgataaaatggatatttggaaacttactcctaagctgtgatttagggtgtatttctacttctggactgcctcaatatcaagggctgagacttttgaattttgaatattcgttgggtttcatgttaagaagcctgtggtctaggagtgctattcagtgtttcttttcctgataaacactttgaatattttttttgtgtttttgtttccttttctgaagctgttcctccttttaaatatttttaatcacattgataaaatctatccttcaccacctctggttctactatagttgatttttattttaaatgtttaattgtatttgattaaacacttaactggattttggaataataaaactctcgtccaatttggcttttaaaaa

SEQ ID NO: 673 - DNA, 9308 bp, Homo sapiens
cttccatgggacttaatgaagagcagaaagaatttcaaaaagtggcctttgactttgctgcccgagagatggctccaaatatggcagagtgggaccagaaggtaggcgtttttcttgtgcttagacgttctaacaacagatgtctcaggcagacctttatctttgtctcccgataatgtaattgttaaatgtctcctccacttaccaactcttactgcaagtgagaataccggtagtggatgatttttcctagaaggcatcctgatcatcttgtacataactttttttttgttagttgaataaagatttggatataaaactaaggcagttctatagataataaaaagaaacttcttaatgccagaacaagtttttacaggacccatgttaactgataaccactgtaagatgacaaacaggcatattaagagaattcatacgctgtcgcatgtgcaagcctcctaatccctcactgtgccctctaaaaggaaggccgtctctgaatcagctgctgatcaccctgctctcttttgtacgtaggagctgttcccagtggatgtgatgcggaaggcagcccagctaggcttcggaggggtctacatacaaacagatgtgggcgggtctgggctgtcacgtcttgatacctctgtcatttttgaagccttggctacaggctgcaccagcaccacagcctatataagcatccacaagtgagtgcccaagcttggaaggcacaatgaagtgctcactcgggctgactgtgagagttcagattcgtaggaaaaagattgatcttttgaagctgagtgtcctcaaggaactggacttaaaagtacactctaggggccgggcgcagtggctcgtgcctgtaatcccagcactttgggaggccaaggcaggcagatcacgaggtcaggagtttgagaccagcctggccaacgtggtgaaaccccgtccctgctaaaaatacaaaaaattagccgggtgtggtggctggcgcctgtagtcccagctactcgggaggctgaggcaggaggatggtgtgaacccgggaggcggagcttgcagtgagccgagatggaccactgcactccagcctgggcgacagagcgagactccatctcaaaaaaaataaataaataaaataagtacacgctaggtctgttgctgcctgttggacttgattctgtcatcctgtgtattgcttagggaatcaggtcagccagctttctcagaaatcttattttgagctggtaccaggagacttctccaatagagtgatcagggtcctctcacccttttatttatttatttatttttaagacagagtctcgctctgttgcccaggctagggtgcagtggcatgacctcggctcactgcaacctccgtctccccggttcaagtgattctcctgcctcagcctcctgagtagctgggattacaggcacgtgccaccacacctggctaattttttttcatatttagtagagatggggtttcaccatgttagtcaggctggtctcaaactcctgaccttgtgttctgcctgcctcggcctcccatagtgctgggattacagatgtgagccaccgcacccggcccctctcacccttttcctcaatccaaagatggaactgccagtgatttgaggaagtaatagaaactactaatagaaagcacatataactctgatttttagaggctcgtgtaacctaactagaagtagtacaaacgtgctggtgagaagtacctcagcctggttatctctgggtagtccttattccaggaatatgttttaatccaccgtttgcctttaaagagtcttcccaattgtgactctccccttcccactcttctgctttactccactgccctgccctttgttctctttccccttctcccccatttttttttcttttccatctttatttctgtcattgtcttttcttcttggtgtacctatcagcatgtgtgcctggatgattgatagcttcggaaatgaggaacagaggcacaaattttgcccaccgctctgtaccatggagaagtttgcttcctactgcctcactgaaccaggtgaatttgccacactgcactgagatatagcagggagagatgcttcctgctcagatggcattaccgagcactccttccagcctcttgacatgtcgagccactgtttatctagctgtttggttgaggagtaatagagtcctgtgacctgatgtcacaaggaccaagaagctatctggtgtgttgggaggtaggcagtggcctgactggtatgagcagtttccaccaagtacagagagttcctttggccacttgggttttgcagtgacacactctgagcagggtctgtttagagaagatttcctagaagatagaattgtgctgggctccctcgacctcactgactttctcaccttctctctgctgccttttgatccctcctcaggaagtgggagtgatgctgcctctcttctgacctccgctaagaaacagggagatcattacatcctcaatggctccaaggtactagcgtgcgtcctcccagagcactttggagattgttcccagcttcctcctgacatcctctggttccttcacatccgcgggttaatactcccataggatttttatgtgttgggaagagaacctctgacccatttctctttctttattctcactgtttgtatctctcctaatctgattccagatcatttcgttgacttttgtctatcctttttatactctcttggactgcctctctgatctgcagtcactgcagcgaccttttacctcacctcagtctctgtgccattggaccttattgtcagtctctgtgccattggaccttattgtcagtctctgtgccattggaccttattgtcagtctctgtgccattggaccttattgtcagtctctgtgccattggaccttattgtcagtctctgtgccattggaccttattgtcaggaggacccagtggtgttcccagacgctgtgagaactcaagcattccctggtccttttgcaccccttttacccccacaggccttcatcagtggtgctggtgagtcagacatctatgtggtcatgtgccgaacaggaggaccaggccccaagggcatctcatgcatagttgttgagaaggggacccctggcctcagctttggcaagaaggagaaaaaggtgagtggctgttggacaggaaacaattcaggttatgagactctgccacctgccagcccaactcctgctctatttcagaaaacaggtttgcatacttgctaacctacctttgaagcagttgcttctattaggattttcaacaggagcatatgaaatacaacagggcattattaaacactaggcctctggggaaagtgacaatgtttgccagtaaattcttcaagccacctgtgagtgttctgacctctcctgcctctgcttttggcctgtgttccttatccagctgcttacgttggtgcactttgttgctccaggaagagacgcttagagaagacctggtgttggccacaagtctcagtaatggaaggcgtgtggtcccttttgcttctttgattaaaaataaagtaaaactcattggagatgattgtgggtatttcagcaacccaagaaggacacttaggtactgtaagtaatttgaaaagtaagatacttctaggattaagagccgccatggccagggcatgaacaggagacctgtgatcatgtaaccgtaattggtaataagggctcaagacccattcagattttttagaccagatgctcaaagcagtcatctctctctagtttgtactgttatggggggactttgtgagagaaggcaggtaatgaaatgacccctaagtgtacctctttctcacagctcctcgggtttctgtattttcctacaggatccttcctgatcctctgtaactgtaaggcattatgcattttagcatccccttctctttggtaacacagcaaccatttcctaggcttctactgtgtgtgaagcccatgctaactcctgggcaggaagaccttcagtaaaaggcttagaaatggagtttatcctatcaacaaaagagagcaaggaaatgatgtaaaggcagtctattttcagagccagagaggaactgggagattgtagatagtttgtggttttcaattagaggcactgaaattgggggcagttggtgtcacaatcctaaaagaagttgtgagaagtgtttgtaggttagtcaggtagagtagacattagtagattctcttaataagttagaaaatgtttagctgaaacaggtatctttctgagtgctgacaggcctttaaacctgaactttttctttttcctcattttaagttcttgtgggtctaagtcttgggtgctgaaacccatacctcacaggctcccgtccccagggaaggccgccctacctgctggattgttgggcaaccacgcagtccctgatttttgccaggtggggtggaactcccagccaacacgagctgtgatcttcgaagactgtgctgtccctgtggccaacagaattgggagcgaggggcagggcttcctcattgccgtgagaggactgaacggagggaggatcaatattggtgagatacgcaggggtgtggcagggaggtagcggtccgggacaggcactgctgttttccagcttggttggaacgtcggcgctcttcccctctagcttcctgctccctgggggctgcccacgcctctgtcatcctcacccgagaccacctcaatgtccggaagcagtttggagagcctctggccagtaaccaggtaacctctgccttgcctccacatggctttgcactatttgcagcccgggacctgctctagggcccacatttccaggagagaagccaggaaattcctctgtcagtcccaccactgtcctagccagagcttgtgctttatttctgtccatcttttcttgggatatctttaacgatattaaagtgtcgggtgagtgaagtggacttagcacttaaaagcaataaatttcctctatagaaaaagcaagagactttgaagctttggatcacttagaaaaggcgcctccgagatgtcttaccgaggctcctgcaccaggtgctggtctaagcccctcagtcttgtctggttctctgctccctgtgctgcagtacttgcaattcacactggctgatatggcaacaaggctggtggccgcgcggctgatggtccgcaatgcagcagtggctctgcaggaggagaggaaggatgcagtggccttgtgctccatggccaagctctttgctacagatgaatgctttgccgtaagtgattcctctggctctcctgggatggacagggaacagctgctaggcccagcgggtcttgagagacatgagtcagatttggaacccagccctcctggaatcccacaaggatcaccttaagcttaaggatataaatgaactcatgagcggcctatgtgggagctctcatcgctggcttttaggcctgctgcatgccattatacacttcattatgtcactgttgtttggttgtgttctaggcgagaaaccacctttggaaggttcacagcagccccaatttagcactctgccatgtttacattgtcaggctgcattgccactagggggaaccatagctttttatcatcccagccagggtggctgtgggcagcttctgcctggcaggtaataagggagaggggcagagggctttgagtcgcctgtctggggggaactgacaagtttagtaggtgaacttcccttgtctctaaccatacagaatgtggaggccctctttgagcttggctgtttgtggttctttcatgggtttatggcgggctgccagatcgtgggctggggtaggaagggaagctgcttgctccacagtcttcccagagtccaagacgtctagtccctgtctccctgcagatctgcaaccaggccttgcagatgcacgggggctacggctacctgaaggattacgctgttcagcagtacgtgcgggactccagggtccaccagattctagaaggtaaaaattgccagaggttattctcttcccttcagaacggggacgggatcgctgctttccccactctctgtccccatgcctcctgggcctcagggtgcagtcaagccctgtctgtctcgaggcttcctcctccctcccgttccacagagctgttctggcaggggcctggagtccagagccgcagcttcgtccctttcggggggcctcagatcgctctgctgctgcccttttcctctggagatctgcgagaagggtgaactgagataatggatgagaaagcatgttgaaaaccacagccggggcttttctctaaggttatcgagtacgtggttctcagggatccaagaacagtgatggacaaggcaaatgtgagccagtatggtcatcagtagctctatattgattatcagccagatggcctaaaagatacctgtctcaatattactagtgtatttttcaataaaataaaccatcactatatgggtatcttcttggtagtcacagacattctatcgaggaaacatggaagccgttggggtcgggctcggagcctggctgtctccactctctacagccagtgcggaagtcttgaaatgacacgactcttggaaaagcaggaggggcagaggcttctttgagtgacttcggtgaagcaacgtgaggctgccttgctggaaacattatataatggggcttccctgcccctttcacagcacccttctcaaacctcagcctgtgctggaatcgcctggagggcatgggagcgcagattgcgggcctcaaccccagagcttctgctccagagggtctagtgtgggcctgggaatttgtatctgcaacaagtcttcaagtgaggctgccacagcttgtctgagaaccacactttgagacccaccgctctggtgttaatgtcagagtcacaggctaccacaggttagaccgctgctttcttctgcaaacctcattccagaaagatgtttatgggctcagtcgccagtgttcaaactgaattcccgagagtcgttttccttccattactcttggaattgctttctcactgagctttatgtgcgtaggaaacttcgccttcattctaactctctctccaccctgcaataataagcaggaaaacatttattgtaggccacaccatcacccacttacagaagaattggggcactcatcactgtatcactttgtttcatcatggactttactgttggataaatctacagtttatgctttatttgagacgatgtgactactgattcctcgagggggtttatatttctttttgcattaaaggccactgctaaaaatgaagcaaataattgataccctcctttcagggaaaatgttttcattcttttgtaagtcagttttctgattaccaaagaaatgtgtatttattgttgaaaccttataaaattaggaaaagtaggctgggtgcggtagcttatgtctataatcgccgcactttgggaggctgaggcgggtggatcgcgtgaggccaggagttcgagaccagcttggccaacccggtgaagccccgactgtctaaaattataaaaagttagctgggcgtggtggtgcatgcctggaatcccagctactcgagaggctgaggcaggaagatcgcttgaacccaggaggtggaggttgcagtgagctgagattgcaccatcgcactccagcctgggtgacagtgagactccatctaaaaacaatacaaaaaattagccgggcctggtggggcctggtggcacatgcttgtggtcccagctactcaggaggctgaggcaagagaattgcttgaacctggggggcggaggttgcagtgagccaagatcacaccactgcactccagcctgggcgacagcaagactgtctcaaaagaaaagtaaaagaaaaaaaatcactcatgtttctacatccagaatgttattttggtacatctccttttaggcattttactctgcctttgttggtacatttttaattttaattagaattatcctgtatatactgtttttattctgcctttttaaactttatataagcatttttaccatcagaagaagtttttaaaaaagtattatttcctgacatttttcagtactttgtagagaagtctctgataatctcatctctcccaggctaaaagcaatgattgtagtttaaatctgcagctactctgaactaggcctggagcagcctggtcagagctttactaaactctcagactttgctgctgtgaaattcttcctccttcctccctcttacaggtagcaatgaagtgatgaggatactgatctctagaagcctgcttcaggagtagaacccacacttgttctggcctggtgttcagtgcgactgcagtcagtgttgagtggtgccatgtgggccgctctattccaaaggaatcatggattagacccaagggctgagctcctctagggcaggacctgcaccctgtgtgttggcaccagcatcgggtcttggactggggcagaatccccagtggaaccggaagagctggactgatgagaaacatcagaagaacacatactaccttgttttcctaatgccagaagggtgaccagtgaagattcaccgtcaaaccatgaaagtcctttcttggatccactttatcttgattagtctgcattttactagttcactggatccctcctctaggggcctggggactttcactgatgctcttcctgattctagagcaaaggtgtgggaaggggaaatggaggaatgccctcctgtctgtgtcgttctctgtgccacagctacagatgcagaaggtttctctggatagcacacctctgaatgtaaatcatgataaaatggatatttggaaacttactcctaagctgtgatttagggtgtatttctacttctggactgcctcaatatcaagggctgagacttttgaattttgaatattcgttgggtttcatgttaagaagcctgtggtctaggagtgctattcagtgtttcttttcctgataaacactttgaatattttttttgtgtttttgtttccttttctgaagctgttcctccttttaaatatttttaatcacattgataaaatctatccttcaccacctctggttctactatagttgatttttattttaaatgtttaattgtatttgattaaacacttaactggattttggaataataaaactctcgtccaatttggcttttaaaaa

SEQ ID NO: 674 - DNA, 428 bp, Homo sapiens
cagaagacataccagtcaatgggttcttgaaatagtcaaggaatgtggcaattcacgctggatgtggaaggtggaaggaaagacaagtgttagcaaatgcagacctgtctgctgtggaacttgaagaccttgctagtagtcaggctgcttcctggcattccaggcctgagaggcttctattttgactcaaagcaaaaacaaatgctatgttaatgtcttcctatgtgtccccttcataagattttggtgaaatcatattaaaagtgcatttctcagtatcactctcagttatttagagatttcagttccccagtaccctggcaagggatttgacgaacgtagcaagaacgtcgtgaactttgagctaatttatatcattgttcatttgtctgtttaataaataaaagcaagaaaaccagagcaacaaa

SEQ ID NO: 675 - DNA, 428 bp, Homo sapiens; identical to SEQ ID NO: 674

SEQ ID NO: 676 - DNA, 224 bp, Homo sapiens
ttttgtatttttagtagaggcggggtttttccatgttggtcaggctggtcttgagctcctgacctcaggtgatctgcccgcctcggcctcctgaagtgctgggattataggcgtgaaccatcacgcccagcccatagtgctcttcagtgtcagttataatgaccaaagttctagcactgtggcctcaacctctaggtctacaactgcattttactaagtgctag

SEQ ID NO: 677 - DNA, 428 bp, Homo sapiens; identical to SEQ ID NO: 674

SEQ ID NO: 678 - DNA, 638 bp, Homo sapiens
  misc_feature (626): n equals a,t,g, or c
  misc_feature (633): n equals a,t,g, or c
tttgagttcaattctgaccaagcacactttctggaattactactatattgcaaacatattgtagcagttctagatacgctttttttagttaatgttcatcaatatttaaaaaatatttttctcagtattaaaacaagttaaaaataccattgataagaattcaggctctgggttgaggcagctctcagtggaaatcctagctatgcctctcaaagccatgtcctataataagctattgaatctctccaatacttgatttcctagattatgaaataatactacacagtacctcagagaatcattgacagaattaaataagtcaggtaatgcattgaacacagtgcttagtacagcaaatgttactaaatgtaaacatttctagcaatgatgagtgatgattcctgttatgtacagaatatgtacgtaccatttgctagtgtatctcaacagaatagaacacatcatataatatgatgcaagttatattaataacataatgtctatgcatatattttgttatatccatagaaaattttcacggattaatagttcagtgtgtggcctttactacactcaacaaatgttagttatactattattatcattattactagcgggggattctntacacgnaagag

SEQ ID NO: 679 - DNA, 649 bp, Homo sapiens
tttgagttcaattactaccaagcacactttctggaattactactaaattgcaaacatattgtagcagttctaaagacgcttttttgagttaatgttcatcaatatttaaaaaatatttttctcagtattaaaacaagttaaaaataccattgataagaattcaggctctgggctgagacagctctcagtggaaatcctagctctgcctctcaaagccatgtcctaaaataagctattaaatctctccaatacttgatttcctagattatgaaataatactacacactacctcagagaatcattgacagaattaaataagtcaggtaatgcattgaacacagtgcttagtacaacaaatgttactaaatgtaaacatttctacaatgatgagtgatgattctgttatgtacagatatgtactaccatttgctagtgtatcacaacagaatagaacacatcatataatatgatgcaagttatattaataacataatgtctatgcatatattttgttatatccatagaaaattttaacaaattaatagcacagtgtgtggcctttactacactcaacaaatgttagttatattattattatcattattacttacaatggctttcttcagggggaggaactataggagatttc

SEQ ID NO: 680 - DNA, 3922 bp, Homo sapiens
tttttttaatcatactttaagttctagggtacatgtgcacaacgtgcaggtttgttacatatgtatacatgtgccatgtttctgtgctgaccccattaactagttatttacattaggtatatatcctaatgctatccctccctcctctgcccaccccacaacaggccccggtgtgtgatgttccccttcctgtgtccatgtgttctcattgttcaattcccacctatgagtgagaacatgtggtgtttggttttttgtccttgcaatagtttgctcacaatgatggtttccggcttcatccatgtccctacaaaggacatgaactcatcgtttttcatggctgcatagtatttcatggtgtatatgtgccacattttcttaatccagtctatcattgttggacatttgggttggttccaagtctttgctattgtgaatagtgccacaataaacatacgtgtgcatgtgtcttcatagcagcatgatttagaatcctttgggtatatacccagtaatgcgatgtctgggtcaaatggtatttctagttctagatccctgaggaatcaccacactgtcttccacaatggttgaactagtttacagtcccaccaacagtgtaaaagtgttcctatttctccacagcctctccagcacctgttgtttcctgacatttgaatgatcgccattgtaactggtgtgagatggtatctcactgtggttttgatttgcatttctctgatggccagtgatgatgagcattttgtcatgtgtgtattggctgcataaatgtcttcttttgagaagtgcctgttcatatcctttgcccactttttgatggggttgtttgtttttttcttgtaaatttgtttgagttcattgtagattctggatattagccctttgtcagatgagtagattgcaaaaattttctcccattttgtaggttgcctgttcactctgatggtagtttcttttgctgtgcagaagctctttagtttaattagatcccatttgtcaattttggcttttgttgccattgcttttggtgttttagacatgaagtccttgcccatgcctatgtcctgaatggtattgcctacctggaggcatcatgctacctgacttcaaactatactacaaggctacagtaaccaaaacagcatggtactggtaccaaaacagagatatagaccaatggaacagaacagagccctcagaaataataccacacatctacaaccatctgatctttgacaaacctgacaaaaacaagaaatggggaaagtattccctatttaataaatggtgctgggaaaattggctagccatatgtagaaagctgaaactggtttccttccttataccttatacaaaaattaattcaagatggattaaagacttaaatgttagacctaaaaccataaaaaccctagaagaaaagctaggcaataccattcaggacataggcatgttttgtggcttttaatgaatactcttaataatttgtaaatctttctctagaatagacttctagttcccattagaactagactagtggttaacattactgttatcacagatcagagactgggatgcatgataagttttccttgtcttccttcagctctaaccacaccgactttctcatgtttgggggtgatattatttctcactgtatttgcattgcaattctgaaaaatatcttcctatcccacctctgttttgttttccatgaagtgagcaaatttaccaagtgatttggaagaaatttatataattgtatagcttgaaaagcctttttttcccctacaaatgtattatttaggacatgtaaaatttagcaaacacagatattttaagcataatttactaaatattgatgataacgcatgctcagaagtcttcatttagaggactctcaatttgtctgagtgtaaactcaattccaacaatcaaaataatttgatatctggtttttgctttagcaacttcacttggttggccaatgttttaattctccagtccttgatctctcattgtggtaaacccacaggataattttattagtgctttgattttctgtaagaggcttttttgtttttctttaattcagcatataattggtgcatgtttaaacttatttgtgtttcggttgaaaggcagttattagtagagagtatcaatagagagttattatagagagtattagttattatttgcagaaatgttaaccttactatctagagcaggatctttctgcctcagcacattgatattttggactggataattctttactttaagggatttgtcatgcgttgtagagtgtttagcagtgtccctggtcgatccccggtagattccaataacaagctgccaatcatgacaataaaaaatgtctgaaatattgccaaatgtcccctaagggtgcaaaactgcccccagttgagaatcactgatcagtagagatgaaaacagaaaaagaatctgtaggcattttgtgacctaaataagacattcttatctccgtgttgctagcttttattttgtggctgagtgaattgttttcagtgtgaagaccaatggtacactggatttctatttaaagatggtttcaaatatgtaaaataattgatagtttacaagccacccaaacatatttccccacttccttttctgagtttagttgagaaaattttatatgtagaaagctgaaactggatcctttccttacaccttatacaaaaatcaattcaagatgggttaaagacttaaacgttagacctaaaaccataaaaaccctagaagaaaacctaggcattaccattcaggacataggcatgggcaaggacttcatgtctaaaacaccaaaagcaatggcaacaaaagccaaaattgacaaatgggatctaattaaactaaagagcttctgcacagcaagagaaaataccatcagagtgaacaggcaacctacaaaacgggagaaaatttttgcaatctactcatctgacaaagggctaatatccagaatctacaatgaacacaaacaaatttacaagaaaaaaacaaacaaccccatcaacaagtgggtgaaggatatgaacagacacttctcaaaagaagacatttatgcagccaaaagacacatgaaaaaatgctcatcatcactggccatcagagaaatgcaaatcaaaaccacaatgagataccatctcacaccagttagaacggtgatcattaaaaagtcaggaaacaacaggtgctggagaggctgtggagaaataggaacacttttacactgttggtgggactgtaaactagttcaaccattgtggaagtcagtgtgttgattcctcagggatctagaacttgaaataccatttgacccagccattgcattactgggtatatacccaaaggattataaatcatgctgttataaagacacatgcacacgtatgtttattgcagcactattcacaatagcaaagacttggaaccaacccaaatgtccaacaatgatagactggattaagaaaatgtggcacatatacaccatgaaatactatgcagccataaaaaacaatgagttcatgtcctttgtagggacatggatgaagctggaaaccatcattctgagcaaactatcgcaaggacaaaaaaccaaacaccgcatgttctcactcataggtgggaattgaacaataagaacacatggacacaggaaggggaacatcacacaccggggcctgttgtggggtgggggaagcggggagggatagcattaggagatatacctaatgttaaatgactagttaatgggggcagcacaccaacatggcacatgtatacatatgtaacaaacttgcacgttgcgcacatgtactctaaaacttaaaggataataaaaaaatttcttcct

SEQ ID NO: 681 - DNA, 426 bp, Homo sapiens
tgcccacccaccccacacgaccaccctctgtactccttggggccccacccacttcctggctttcaccatcattttctcttcatctcctgccccctgtctgcatcccaagctccacacctgcttccgggtagcagaagccccagctctgctgtgtcccctggctgacatacctggagggttccaaggcagaagtggccagcccctccccctcagtatgggctcctccatcctctgtaggggaggggccatagcttcctcccagtgacccatgtgctccctgtacacccaagcgtctctggcagttctgaccacacccccaccggaggtccagagctcccagggacgttggcaagccagaccggaggccgccctgtttccttctgccttgatcccatggctggggatgccagggtcctctgtgggccc

SEQ ID NO: 682 - DNA, 431 bp, Homo sapiens
tgcctgcccacccaccccacacgaccaccctctgtactccttggggccccacccacttcctggctttcaccatcattttctcctcatctcctgccccctgtctgcatcccaagctccacacctgcttccgggtagcagaagccccagctctgctgtgtcccctggctgacatacctggagggttccaaggcagaagtggccagcccctccccctcagtatgggctcctccatcctctgtaggggaggggccatagcttcctcccagtgacccatgtgctccctgtacacccaagcgtctctggcagttctgaccacacccccaccggagggtcagggctcccagggagcgtggcaagccagaccggaggccgccctgtttccttctgccttgatcccatggctggggatgcccagggtcctctgtgggccc

SEQ ID NO: 683 - DNA, 4280 bp, Homo sapiens
gcgatgacgtctgcctgaaggtggtggagctctacctgaacgagaagaagcggggtgccgctggtgggaacctgtcctcccgctgcgtccgcgctgctagggagaccagctaccagtggaaggctgagcgctgcatggccgacgagaactgcttcaaggtgagaggaggcctggggctgggaacacgccgggaggcccggccgctcactccgctctggactcagtcctgggtggaccctggttcagcggctgggacaccggccctgctgcagagcccatgaggtacctttgacctgcaggaagcatcagggctttgggagggtggcaaaggcgggaggcgggtggccttgcgagcctgcgctgtgccggctgggctgtgccggcagtggaggctgtcagcgttcctgctccgcaggtgatgttcctgcagcgcaaagggcaggtgatcatgaccatcgagctcctggacaccgaggaggcccagacggaggaccctgtggaggtccaggtgaggccctggccccagtctgtgccacgcataccagggagctgctgagggcagcagcatgggctcccaccagccaacgcaggccgcgcagcatccagagaccctccctctgcagggcacaggctctccttgaggcctggtgggtggggttgcctccctccctgcttccccaccaggctctcttctgtgccccctctccaaagagcagaccactcctcctgagcaagcggttgtgtcccagggcaggaggggaaccaagccacctctccctggcccccgactcccactcagggcatcccgtggctgtgacctctgcacctcttgtgtcagggctgcatcctgttcctaatccccagcagaggagccacctgggcccagctcccagtcacaatttttgcggggacagatgtttcctgctcacctcccgcatcctggtgacagtgaggcattgacccgtgtgtgtccccagggtggtcattggggcctgcagctcccggcacctgccaacaggtccagtgtgtgtgcacattactcagctaggccaaccccattcatttcctggggctaccaccacaatgaccacaaaccacgtggcttcaaacaacagaagtctattccctcaacgtcctggaggtcagcagtccacaaccacagtgtgggccgggcggtgctcctgccaaaggctctggggcggatccttcctgctcttccagcttccgggggcttctggcgctcctcagctgtggcctggttgtgtgagtcccgctgtcactgggtcctctgtcaagagctatagtctgttggggtctccgtcagggatcagagtcctctgcagcggctctcctcatgctctggcagtggggggcacagaacccctgtgagctcctgaactcagagtccagagtaagagtggccatagccctgctgtaggggcatcacgggctgtgtctctccctgtccccagcacctggctcggtacgtggagcagtatgtggggaccgagggcgcgtccagctcgcccactgagggcttcctcctgaaacctgtgttcctgcagaggtaagaggccctgagatgcatgctccgttccttccttcctgggcccagggagtgtcccctttgtcctgacgggggctggaccatggcacactgtctgggagcacttagtaggtgcctgctgtgtgctgaggcaggccctgcccttttgaggcttgtggtttgcagtggagggattagtaaccccaggacggtgaggtgtaggaggggcaaggccaaccccacgatgcgtcagtgggtgaagagtgaatgcccggactggagggagacgctgccagagctggtggggccaggccagaggcgggtggctgtggcaggaccctggaccacctcaggtcgggctaggatggcacctatgggaccagtgggggctgctggtgggtgttcagatctgggggcatttcttgttgcttccatttgctttctgtggacccctgggaggtagcacatcttctgatggtcccaggcctggggtttcccagcctgcaaatcctcctcccacaatgccgagagccagagtccattccacctcctttcgcccccaggaacctcaagaagttccgccgccggtggcagagcgagcaggcgcgggccctgcgcggtgaggccaggagctcctggaagcggctggtgggcgtggagagcgcctgcgacgtggactgccgcttcaagctcagcactcacaagatggtgttcatcgtgaactccgaggactacatgtaccgtcgcgggaccctctgccgggccaagcaggtgccaggggaggcctgggctgccccgacatgcccctcctcaccccaagtcctggggccctgggggtccagccctcagctgccctgacacccggcctcttcaacaggtgcagcccctggtcctgctccgccaccaccagcactttgaggagtggcacagcgctggctggaggacaatgtgacggtggaggcggctagcctggtgcaggactggctgatgggtgaggaggacgaggacatggtaccctgcaagacgctgtgtgagacagtgcacgtgcacggcctgcccgtgacccgctaccgcgtgcagtacagccgccgcccggcctcgccctgaccccgcctcatgggcaccgggcaggcgcctcacagagcacagacgtccctcggccttggtcgtgtcggggccgttttcttgaacgacgtgagaggcatctcccagcccctctgctgccggacagcgcactccagggcaggacgtcgcccccgtggctcccggtctcctgtgggcctgctgtgtgccaaacctgagctacctgcacccgagccctggggtcagtccacaccacaggggcgggtggacgtgctggccgaggaacaagcaatcatgtttgcgtccccgtccgtcacatgtgccaaatccctggcaggcagatggctcctgccccatattcttgccgtgtcttggaaaagtcacaggtgacagccctcctgaggcccacactttggagggggtccatgtccaagagaccctgacaaggaaggagttgagccctgggtaggcttgcttgaaaagtgagtccttccagaatattctcagagctgccagaaacatcatctgagggtttgggcatcagctctgcctggctggtgttcaggccctcagtcactttggaagtgagaagaacccttcagccaaacctttgggatcccattttgaagtccagagctggagcagtgcggcagtgccctgggagaccccgctctggataagacacccaaccccaactccagcagctggactctgggcccacaaggggagggaccccagccagtattccctcagagccggcacgaccctgctgtggggcggcgggcccagtcgtgttcctgcagtgggcaccctaggcgtatgtgtatacacgcacagatatttattcctttcgcttttagtggttgttatttctgtagcagccaagtcctgcggctccctggggctgagatctccctttgtggaactccgagagccgccctgacagtcccagccgccacccaaggagccccatccgcccacccaccctgggacccacgcggccactccagggatcattgttgtccttttgtgaggggctgaggcgactgtcccatggaggcatccaaggctttctgtgccaagaatcccaagtgactggggctggggaccacttctccaggcctctctccccgaccatgagagcccctgccctggcccctgcacaccagtgggcccagaataaccgccacccttgccatcctgcaacagctggactcaagtttccaggaagtggagatgtgtttctagaagtttcctgtggaacctggaggctcctgacgcctttgactccaggctgggcgattccgatgctgacccgtcctcctgggctccccacccccgctccccaaatgtcacacaggcactttgtacacatcctggttttctaagaagggaacttgccatcaagattcctgtaccaggcccacggccgtctcgggcagagccacctgggccccgggtgcagccggagaccccgccgagcccctcctcccagtattcccatccccgcatgcttctagggagcgcctcttttccgttcttgaggaatttctgttctggggcttgtccttcctttgcagctgttttgaatgtagttttccttttctatttatttgcacattaaagttaataattgaatattgacatcaag

SEQ ID NO: 684 - DNA, 1178 bp, Homo sapiens
aaaggctgtgctggtcccaggagagcagacaaagagcagatctccgaggtggccctgccctgaggggtcccctgccctcaagtagggcccatggccttgatgaggtgatatgacatgagttgagagaggttcctcactggccctgaagatgtctccgctgtgctggggaggggaccctgtggcaagggacagagagtggcctccaagagccaagggggacctcagagccaccactaccaccaggacccaaattctgcccaagtccacttgggcccagaaaaggcccccgagcagcagataaggacacagcccagctgacaccttgatctcagcctcatttgaccctgaaccaaagacccagcctcccaggctggacccctgacccacggaaacaaaaggtcatagaggcgtgtggctgtgagccacattcattatccagagatagatacagcagcattaataaagccgctgcatgtccagcacctccccttccacctccgtcaagtacggggaggtggctgagggtctcaggaacccctactgaggggggaaatgaaagaaaaaagaaaaaattaaaaagagaattaagcttttcctgtattaggctgacttgtctcagaggcagcaacaggcacagcccagacccaggaaaagtcttaataatactaagaagccaagacacaaaggaatgtgctctggagcctctcccagcactccctcaacatagggagaagaaaaacaaattttcctttgtttcatggtatgagtttatagattcctgctctctacacctagtgacttcaaatattctgttttatcagcagtggagtgaaggtcataaactgtctgagcagcctgagatagagccacctgggtgccatagtgatggccatggaataagccatgctaagcactagggcaaacctacataatggccatctgagttgcacagcaacggtcatgtctaatcctgagttatgagcctgttataatttgattaactgtctttgtcctgcctctgtatccctgctttcacgccactgtaagcctgcttcaagctaacccacccctttttaaaagtgtgtttaagtcaagtgctgtctttattctaggcccagtttttagacgttgagtccagtgggtctgagtgcactcaataaagatcctcctgtatacac

SEQ ID NO: 685 - DNA, 14535 bp, Homo sapiens
accctgtcaccgctgtccccgttgtcctgaaaaggtgccctgtggcgtcccgacttcccttccccttccccttcccccttccctcccctcccctcccctcccctccccactgcagggagcccttggagagctcattagtgctgtttgtcaacaggtgtcatctccaggggtggtctctgaggcctaagggtgccttcctgtatttcccagtctcccactcctgagaggagagcactgtgaccttctaggactttccaccttgcacataatacatctagacatctaaataactgctttaagagtcagatgcgaccactacactgtggcttgcattttatttaatgctgcatttcggatgccgtccggcgctagttaacaggcatttatcaagtggtcactttcaggcaggtgcagtgcttggccctgggattatgcagctgagtgaggcagacccagtccctctcttgggactcacagctgagcaggggacctgagtggttgagccaacagccatgcggagagtgctgggtgccagggaggaggtggaggaaccgggaagccggccacattggctctgtaaggccatcacgccctccctctgacgtgcacagagcccactgcacagactaggctgggagctggctgggcctgggtcctggacccccagtcaagtcccagaggaagacaggccagccctgggatgcttcagggaggatgccctggcttgtccctggtgctgacctctcttccccccgcagactgaaggccaaggaagaggagtggcgggaggcccagcagggcttcaacaagatctggcgggagcagtatgagaaggcgtacctcaagtcccttgaccaccaggctgtgaacttcaagcagaacgacaccaaggccctgcgctccaagagcttgctcaacgagatcgagagcgtctacgacgaggtaaagccttccctagccctgccggccggtgggggtggggtcctggctctcccgaccgccgggtctgtgcctctgtttccctggtggttaggcagggtagtggcattgccctttcagggctgtgttgaggcgagggttcatgtctctgtgatgcccagcctgtggcctgccctaggagaaccagcaactctgccattgtctatctgtttgtttgtttggagacagagtctcgctgtgttacacaggctggagtgcagtggtgtgatctcagctcactgtaacctcagcctcctgggttcaagtgattcttctgcctcagcctcctgagtggctgggactacaggcgcacaccaccacacccagctaatttttatatttttagtagagatgggttttcaccatgttggccaggctggtcttgaactcctgacctcgtgatccacccacctcagcctcccaaagtgctgggattacatgcgtaagccaccgctcctggccgactctgccattgtctagcgaagtctccgtccctcccgtggggcagtgatggactttggcttaggtagtgggtggcagcagccttcatttctttcttgccgactgtgccaggcaccggtgttagcaacacagaaagagtaatgcatcatctgacctcactcctgaacctgactctgctgcggcattattctgattttaccagtggggaaactgaggcacaagaggttgcatttgcctgggctggtcgcagggggccagggctctgagtcattgggttcgaggctttcggctgcatgtcctcactgcaggctcacaaggcctgagtcatagaaccaaggccagcggggccctcaggttgccaggagctgggcctgttagtagctgtgtgtagggagtgcctgcttgcaggatcctgaggtgggaagcttggcagggtgccgggcgtggtgatagccagctgtcgggaaggtccttggacactctgaggaggtggcttaggagggcacactactccccaggcagtgcccagatcatggcacgggctgcgttatcagcctggtgcccacctgggcagggggtgttgcctcacctgatttggtttcttgctcctgtcactgcacagtgagcggtcgctccttcttttacaacacagaaacggaatccacaggagccgggctgctggcccaaggcctctcccagagcctgtgggactgtggggacccccttccctcccacctcccttcccgtgggccaccctcgccccaggcccacccacaaccactctggcttcctcactctagtcctcggcgatcctcaagcccaagaccccgtataggttctgtgggtctgtggtgtctgcaaagtgcagatgatgaagtagccctggaaatccaccaatgcgaccctgagttcctggatccctccctggggctggggctgacaaagggaggggcaccaaggttcatatgcagatctctgcacatgcaggtccttgatgaattccaaagtcagaaccccattccatcacgtgatttacaaagcatggttacagatcatggacatggggaccctgcttcagaggggactgtaaaggaattttcagagtgtttatggcataaatgagacctgggggacttaggaagcagtcagagggcgatggtcacactgaagagcccagagcagggctgagcgtgcagactcctaggaaccaggtcagtgtgcttggccctaccagcctctaagccgccttgcaggggaggaggaagggaaacctcaggctgctaggagacccggtccttccctcgggagcctgcagagatggcatccacgctcattttccccaagagccctgctgcgtctgcctccctgccttggactgagggggttggggctgcccagcagaggccctgggtgccaggacagtggtgtgggaggctggaggaaggggtgattgtctaatggtgtgagggaatgaaagtcatgatctagataaagaccaaggggaggggtgagcctgggacagggttttccagggagtgagagcagatgggcatgtgcaaaggccctgcacacgcaggagggagcttggcgcggtgaggctggaggagctgtggaggggcacatcaggggccggcgtcttctgagcagcctgggaaagcctgaagggcattagttggggtgaccatgctcctgtgggccaagtcaccctggacccagtgaggagagtggttggagcaggctggtgggagctggtgggagggctggtgacatgatggtggtagcaagcacgtgcaggggctggcggggacagcagcggaggcgggggcttggtgacgatgggcgtgcaggtcttcagatgtgagcagttgcaggccttccgggtagtagatggagggcagaggcagagaggtcacggctcaccctttgcctccttgacttcatcgatagcatggtgtgggcagccccggtcgagctggaatcaggcgccaccgttgctttcagtaggaggaggtcagcctcagaggcttctccatgctgagccacggggccccgttctgtcctggagctgggctgagcgacagacccaggcttgacgctgtcagaccccctgtgaaccccgccccacatctcagaatcctcttggctcctttgtctggggtcccgggatgacttgggtctgcctcactttcggagaggggaccaggagcacatggggctgcacaagaggttgaggcaagcgacctaccccccaggccctgctgcctcaccgatgttcgccacccatcctgctctgggcagcgctcatccaccttggtggcccagttaacagcgagtcgtgaatgggcactgggggtcctctgggtgctgggtggctttccacctaatggccgcccttccccccacagcaccaggagcagcactcggagggccgcagtgccccctctagcgagccgcacctcatctttgtgtacgaggaccggcagatcctggaggacgcagcagcgctcatcagctactacgtgaagcggcagccggccatccagaaggaggaccagggcaccatccaccagctgctgcaccagttcgtgcccagcctcttcttctctcagcagctggacctgggcgcctccgaggagtcagctgatgaggaccgggacagcccccaggggcagaccacagaccccagtgagcggaagaagccggcgccaggaccccacagtagccccccagaggagaagggggccttcggggatgccccggccactgagcagccacccctgccgcccccagccccgcacaagcccctggacgatgtctacagcctattttttgccaacaacaactggtacttcttcctgcgcctgcaccagaccctgtgctccaggctgctgaagatctaccgccaggcgcagaagcagcttctggagtatcggaccgagaaggagcgggagaagctgctgtgtgagggccgcagggagaagggcagcgaccccgccatggagctgcggctgaagcagcccagtaaggctccaaagcctgccgggaggccccggggggtgcctggggttaggggtcacagctcatgatctgacatgtcctgttacttttctttctggcttttcattttaagagaattctgtgatttcaaatgggaaattgcaaacaggaagttgccagcataagacagaggtctcacgtacccctcgcccaggctcccctggccgtggcacctgtcctgggtgtagcaccctctcctgactggggaacatttgtttctcatgggctttctcgtggagccgtcatggcccagctccacagtaccctttttctttctttttttttttttttgagatggagtcttgcgctgttgcgcaggctggagtatagtggcaggatctcggcccactgcaacctccacttcccaggttcaagtgattctcctgccttagcctcccaagtagctgggattacaggcgctcaccaccatgcctggctcattttttgtatttcttttttgaaatggagtcttgctctattgcccagcctggagcacagtggcatgatctcggctcactgcagcctccgcctcccaggttcaagcaattctctgcctcagcctctgagtagctgggattacaggcacccaccaccatgtccggttattttttttttgtatttttagtggagacgaggtttcaccatcttgaccaggctggtcttaaaactcctgaccttgtgatccacctgcctcgggcttccaaagtgatgggattacaggcatgagccaccgcgcccagcccaattttttgtatttttaatagagacaggatttcaccatgttggccaacctggtctcaaactcctgaactcaggtgatccgcctgcctcagcctccccaagtgctgggattacaggcatgggccaccatgcctggcctccacagcattctcgctgccatccctgggttgccggccagattaggcagcctcggagggtggcagtgaacaccagctactcgggtttcctggtgattcccacatttgccccaggggtggcaggtgagggctgttgggccccatgggggcatttgttggggctctgtcatgccagagtttggcctgcgtgactttgcgctctccaggaggcatatggatgaggcggtgtgtctccgcaggtgaagtggagctggaggagtactacccggccttcctggacatggtgcggagcctgctggagggcagcatcgaccccacgcagtacgaggacaccctacgcgagatgttcaccatccatgcctacgtgggcttcaccatggacaagctggtgcagaacattgcgcggcaggtgagccgggccggggtggggccggccctgaggacggcggaaatggctctaccatcatttcactccccgctcgggagggggcccgtggtcagcacagcaaacctatcctgttttttcttaattgagacaaaattcgcataacgtaaaattaaccattttgaagtgtacagtttggtaacatttggtacattcacaatattgtgcaaccaccacctctgtctagttccagaacatttcatctttccaaaaggagaccccatccccatcagcagccactgcccattcccctgccccgagcccctgacatccagtcaactgctttctgcctctgtatttccctcgtgcttcattcctttttatggctctgtaatactccattgcgtgggtagctacgttttgtttctatctcttggtggacatctgggctgtggctgccttatagagattgtgagcaatgctgctctgaacatttgtgtacaagtttttgttccgtgtccctgttgacaaacctttcttgaggttaaattgacaacatggaaaaaaccttaacccacttatcctgagggagggtgggaatagtgatttcatctgcgttggttttagtagtagcaaaaacccaggccccactgaatgtcaacacaaggaaactggtcacgtaaatataaacagcagacgtcccagacgagctgggtgtggttccaggacatgggtcctgcctggtttctgccagaatcattgttcatggtgacctccatttcctggtcaccaagtaaggctgttcatcataaagtggaaaaaaagctggaaaaaaaataatgccattactctcccacccagacacagccacgagaagcatttcagacaggacgtttccttccaggttttaaagactgcttaatggagctaaaatacccaagcagaaaagtccccaaatttgaagggggcagatggatgggcttttcatcaacagaacccctgcccctgtgtccccacccagccacctgccacccatggacacccacaaccctgatttctttttcttcttcttctttttttttttttgagacagagttttgctcttgtctcccaggctggagtacaatggcacaatctctgctcacagcaacctctgcctcctggtttcaagcaattctcctgcctcagcctcctgagtagctgagattacaggtgcgcaccaccacgcctggctaatttttgtatttttagtagagagggggtttcaccatgttgggcaggctggtctcgaactcctgacctcaggtgatccgcctcccttggcctcctaaagtgctgggattacaggcgtgagccaccgcaccggcatcacaaccctgatttctacagagaggtagatccctggcctcgagctgtgtgttaacagcagcacacagcgcccagccgcatcctgggagcgtcattctgtgagattcctgtgttgagatgaaccggccaaggattccgaggaacgacccccgattccgtccacctgtctcctgaggacaggcatgggcggtgccccgtgggtgtgtctgcggtggccgtctatgtacatttctgctgctgcccttggggtaaggcacagagaggtgtgtcccgctgatggcaactttccgtttcctgggtcactcgtaccagtgctgtgcgaggccgcactctgtgtcctccctggggctcaggggcgtctctccatcagctgggagttcaaatctcggtgggctcacgttgcatttccctgatggcaaatgtggctggggccctgtcctttcatggccgttgggacatcttttctcatggaaagctatccacggtgtttgcgcctgtttccgttgcgtctgccttgttggtgactgggaggatttctgtgtctggccatgaggacttagtgaaacccatagctgcgttctgacaccttcgcttcagccccctccactttccctccgtgtgcccgaaatgggtccctgcccatcaccatccacagcagtggccactccccaggtgagggaaacacgcacggggcagcctggagagaggacacccagggcccagcacatggtgttggggaagtgacgcaggggacgccagggggctggcagtctgtcccctccccccccccccaggctgggcacccctcatgggccatggcttcggggacagcaaccttgcttgtgacaccaggagattggaccagatggtttatggaaagcattgattaatgctttaaaaaaatcccccccttccataaacaactcctctagaacctgttaaaaacaaagcaatgaaaatggggctgtctggctggagctgtagtgagagccacatgctgccctgctgtcccagctgtggctgcaccacaccccagctgcatctccctgggccaggtgctcactgcgggcccctccacactgtttgtaacctgcctcgaggccatgtctggactctgcctccctttttcttaaaaattagcattgctgttttttagcagtagcagttggcattcagtgggcacttgctgtgtgccaggtactgtctgaaacctatgcgtgtccaggtgttattgtatccattcaacaaagctgcacatggaacccccaaggagtgtggtcccctgaccagggcctgggctgtgcaggcgggtgattcacacagccctgtctgccccacgatccctgctgtttccattccttccttcttcagtgcaaaggtaaaaggagtagcagtgtatttacagccaagcatttaggggaaaggaacagcctgcactcaggccaccttcagctcattcctgggtttgctttggaacatatttttccgtgtcttttctgtgtgtttctcacacccgggcagggtttgctggtctggcctggtctgttttgttcaggtctggtctggtctagttttggtctggtctggtctggtctagttttggtctggcctggtctggtctggtttggttttggtttggtctggtttggtctggtctggtctggctttggtctgatttggtttggttttggtttggtctgatttggtctggtctggttttggtctggtctcatctggtctggtgtggtttggttttgatttggtctgatttggtctgctctgatctggtctggtctggtctggtttggtttggttttgatttggtctgatttggtctggtctggtttggtgtggttttggtttggtctggtctggtctggttttggtctggtctggtctgatctgatctggcctggtttggtttggttttggtttggtctgatctggtctgtttggtctggtttggtttggttttagtctggtctggtctggttttggtatggtctaatctggtctagtttggttggttttggtttggtctggtttggtgtggtttggtctgatctgatctggtctggttttggtctggtctgatttgatttggtctggtttggtttggttttagtctggtctagtctggtctggtctggttttggtctggtctaatctggtctagtttggttggttttggtttggtctgatctgatctggtctggttttggtctggtctgatttgatttggtctggtttggtttggtttggttaggttttggtttggtctggtttggtctggtctggtctggttttggtctggtttggtttggttttggtttggtctggtctggtttagtttggtctgatctggtctggtctggtttggttttggtctggtctggtctggttttggtctggtttgggtctggtctggtctggtctgtttggtctggtctggtctggtctggtctgtctggtctggtttggtctggtctggtctggtctggtttggtctggtctggtctggttttggtctggtttgggtctggtctggtctggttttggtctggtttgggtctggtctggtttgggtctggtctggtttggtctggtctggtctggtctggtctggtctggtttggtactggtctggtctggttttggtctggtttgggtctggtctggtctggttctgtttaggtctggtctaggttttggtactggtttgggtactaggtctggtctggttttggtactggtttgggtactggtctggtttggtctggtctggtctgtttggtctggtctggtctgtttggtctggtcatgtttggtctggtctggtctggtctggtctggtctgtttggtctggtctggtctgtttggtttggtctggtctggtctggtctgtttggtctggtctggtctggtctggtctggtctgtttggtctggtctgcccacagcctgtcaggattctggtctcttcatccctgtgtcatgcactctccatcctgatgtgtttctggcctttgtcgacttcctctgtgggtgaggtggggactcccgcaggaggcggggtggccgcaccacctgctttcctcccgccagctgcaccacctcgtgagcgatgacgtctgcctgaaggtggtggagctctacctgaacgagaagaagcggggtgccgctggtgggaacctgtcctcccgctgcgtccgcgctgctagggagaccagctaccagtggaaggctgagcgctgcatggccgacgagaactgcttcaaggtgagaggaggcctggggctgggaacacgccgggaggcccggccgctcactccgctctggactcagtcctgggtggaccctggttcagcggctgggacaccggccctgctgcagagcccatgaggtacctttgacctgcaggaagcatcagggctttgggagggtggcaaaggcgggaggcgggtggccttgcgagcctgcgctgtgccggctgggctgtgccggcagtggaggctgtcagcgttcctgctccgcaggtgatgttcctgcagcgcaaagggcaggtgatcatgaccatcgagctcctggacaccgaggaggcccagacggaggaccctgtggaggtccaggtgaggccctggccccagtctgtgccacgcataccagggagcgcctgagggcagcagcatggggctcccaccagccaagcgcaggccgcgcagcatccagagaccctccctctgcaggccacaggctctccttgaggcctggtgggtggggttgcctccctccctgctcccccaccaggctctcttctgtgccccctctccaaagagcagaccactcctcctgagcaagcggttgtgtcccagggcaggaggggaaccaagccacctctccctggcccccgactcccactcagggcatcccgtggctgtgacctctgcacctcttgtgtcagggctgcatcctgttcctaatccccagcagaggagccacctgggcccagctcccagtcacaatttttgcggggacagatgtttcctgctcacctcccgcatcctggtgacagtgaggcattgacccgtgtgtgtccccagggtggtcattggggcctgcagctcccggcacctgccaacaggtccagtgtgtgtgcacattactcagctaggccaaccccattcatttcctggggctaccaccacaatgaccacaaaccacgtggcttcaaacaacagaagtctattccctcaacgtcctggaggtcagcagtccacaaccacagtgtgggccgggcggtgctcctgccaaaggctctggggcggatccttcctgctcttccagcttccgggggcttctggcgctcctcagctgtggcctggttgtgtgagtcccgctgtcactgggtcctctgtcaagagctatagtctgttggggtctccgtcagggatcagagtcctctgcagcggctctcctcatgctctggcagtggggggcacagaacccctgtgagctcctgaactcagagtccagagtaagagtggccatagccctgctgtaggggcatcacgggctgtgtctctccctgtccccagcacctggctcggtacgtggagcagtatgtggggaccgagggcgcgtccagctcgcccactgagggcttcctcctgaaacctgtgttcctgcagaggtaagaggccctgagatgcatgctctgttccttccttcctgggcccagggagtgtcccctttgtcctgacgggggctggaccatggcacactgtctgggagcacttagtaggtgcctgctgtgtgctgaggcaggccctgcccttttgaggcttgtggtttgcagtggagggattagtaaccccaggacggtgaggtgtaggaggggcaaggccaaccccacgatgcgtcagtgggtgaagagtgaatgcccggactggagggagacgctgccagagctggtggggccaggccagaggcgggtggctgtggcaggaccctggaccacctcaggtcgggctaggatggcacctatgggaccagtgggggctgctggtgggtgttcagatctgggggcatttcttgttgcttccatttgctttctgtggacccctgggaggtagcacatcttctgatggtcccaggcctgggggtttcccagcctgcaaatcctcctcccacaatgccgagagccagagtccattccacctcctttcgcccccaggaacctcaagaagttccgccgccggtggcagagcgagcaggcgcgggccctgcgcggtgaggccaggagctcctggaagcggctggtgggcgtggagagcgcctgcgacgtggactgccgcttcaagctcagcactcacaagatggtgttcatcgtgaactccgaggactacatgtaccgtcgcgggaccctctgccgggccaagcaggtgccaggggaggcctgggctgccccgacatgcccctcctcaccccaagtcctggggccctgggggtccagccctcagctgccctgacacccggcctcttcaacaggtgcagcccctggtcctgctccgccaccaccagcactttgaggagtggcacagccgctggctggaggacaatgtgacggtggaggcggctagcctggtgcaggactggctgatgggtgaggaggacgaggacatggtaccctgcaagacgctgtgtgagacagtgcacgtgcacggcctgcccgtgacccgctaccgcgtgcagtacagccgccgcccggcctcgccctgacccgccctcatgggcaccgggcaggcgcctcacagagcacagacgtgccctcggccttggtcgtgtcggggccgttttcttgaacgacgtgagaggcatctcccagcccctctgctgccggacagcgcactccagggcaggacgccgcccccgtggctcccggtctcctgtgggcctgctgtgtgccaaacctgagctacctgcacccgagccctggggctcagccccaccacaggggcgggtggacgtgctggccgaggaacaagcaatcatgtttgcgtccccgtccgtcacatgtgccaaatccctggcaggcagatggctcctgccccatattcttgccgtgtcttggaaaagtcacaggtgacagccctcctgaggcccacactttggagggggtccatgtccaagagaccctgacaaggaaggagttgagccctgggtaggcttgcttgaaaagtgagtccttccagaatattctcagagctgccagaaacatcatctgagggtttgggcatcagctctgcctggctggtgttcaggccctcagtcactttggaagtgagaagaacccttcagccaaacctttgggatcccattttgaagtccagagctggagcaggcgggcagtgccctgggagaccccgctctggataagacacccaaccccaactccagcagctggactctgggcccacaaggggagggaccccagccagtattccctcagagccggcacgaccctgctgtggggcggcgggcccagtcgtgttcctgcagtgggcaccctaggcgtatgtgtatacacgcacagatatttattcctttcgcttttagtggttgttatttctgtagcagccaagtcctgcggctccctggggctgagatctccctttgtggaactccgagagccgccctgacagtcccagccgccacccaaggagccccatccgcccacccaccctgggacccacgcggccactccagggatcattgttgtccttttgtgaggggctgaggcgactgtcccatggaggcatccaaggctttctgtgccaagaatcccaagtgactggggctggggaccacttctccaggcctctctccccgaccatgagagcccctggccctggcccctgcacaccagtaggcccagaataaccgccacccttgccatcctgcaacagctggactcaagtttccaggaagtggagatgtgtttctagaagtttcctgtggaacctggaggctcctgatgcctttgactccaggctgggcgattccgatgctgacccgtcctcctgggctccccacccccgctccccaagtgtcacacaggcactttgtacacatcctggttttctaagaagggaacttgccatcaagattcctgtaccaggcccacggccgtctcgggcagagccacctgggccccgggtgcagccggagaccccgccgagcccctcctcccagtattcccatccccgcatgcttctagggagcgcctcttttccgttcttgaggaatttctgttctggggcttgtccttcctttgcagctgttttgaatgtagttttccttttctatttatttgcacattaaagttaataattgaatattgacatcaag

SEQ ID NO: 686 - DNA, 238 bp, Homo sapiens
aatgcatgaaatcaaacaaatgctttcgctgaagggctccatctttgcaaaaccgaacctaggacaatgtgcacgtttgtaactagcaattccgtaggacagatcggggaggcagcatgaacttgattttctgtaatttaagagttgtcagtaaagtcagtgtttgcaggcattttcagtgttctgcagtgggcttcagttcggcagtgtggcaggccaggtttccattagcaaccag

SEQ ID NO: 687 - DNA, 667 bp, Homo sapiens
aatgcatgaaatcaaacaaatgctttcgctgaagggctccatctttgcaaaaccgaacctaggacaatgtgcacgtttgtaactagcaattccgtaggacagatcggagaggcagcatgaacttgattttctgtaatttaagagttgtcagtaaagtcagtgtttgcaggcattttcagtgttctgcagtgggcttcagttcggcagtgtggcaggccaggtttccattagcaaccagaacagtttccattaacactttactataattttgatgaatgcataagttaaacgttaaagaaattgagaaactggtgcctgagtatcagggatggaatgcgaaaacgaacccattaagaccccgcctgggtcctctcagaccctaaagtctgatcgaataataatagtattcttacacattcacctgggcctgtcttaagattcagaaactttccaagactctagagaaatctttccagaccctagaccgtagttaaagattagatgttgattgaatgcaacatttctgcttgtaggtgcagtcccaccatagcattgagcttaagatgtatataagcactagaaaaaaacttgaaactttgagttggtctggtgagttacttggcttctccgtctaaccggttgcagaaataaactcctttctttccca

SEQ ID NO: 688 - DNA, 667 bp, Homo sapiens
aatgcatgaaatcaaacaaatgctttcgctgaagggctccatcttatgcaaaaccgaacctaggacaatgtgcacgtttgtaactagcaattccgtagacagatcgcgggaggcagcatgaacttgattttctgtaatttaagagttgtcagtaaagtcagtgtttgcaggcattttcagtgttctgcagtgggcttcagttcggcagtgtggcaggccaggtttccattagcaaccagaacagtttccattaacactttactataattttgatgaatgcataagttaaacgttaaagaaattgagaaactggtgcctgagtatcagggatggaatgcgaaaacgaacccattaagaccccgcctggtcctctcagaccctaaagtctgatcgaataataatagtattcttacacattcacctgggcctgtcttaagattcagaaactttccaagactctagagaaatctttccagaccctagaccgtagttaaagattagatgttgattgaatgcaacatttctgcttgtaggtgcagtcccaccatagcattgagcttaagatgtatataagcactagaaaaaaacttgaaactttgagttggtctggtgagttacttggcttctccgtctaaccggttgcagaaataaactcctttctttccca

SEQ ID NO: 689 - DNA, 654 bp, Homo sapiens
gtcccagttcccgccgtagcgatggccgatttcccagccgcggacgctgaaagcagagactccacgccgatgacccttcggcgtaccatgtccggcgggcgcttggccaaacagcccaagactgcggaatcacactcgccactgtgtacctagacgccatctgcagacccagcgcctgcggggattccggaaacgggagagcgggcttccggaaacggtgaccaatgggaaacgtgatcagatgttactaggcgaacagtccgtttccaggcaacacagaaggaagagacgctctcagtcaccctaaaatagacggagctttcagccaatggatatgcaggtttgctccagattagccaataagaagtgtttggggccggccgagcgcggggcctcacgcatgtaatcccagcactttgggaggccgaggcgggcggatcacgaggtcagaagatcgagaccatcctggctaacacggtgaaaccccgtctctactaaaaatacgaaaaattaaccagacgtggtggcgggcgcctatagtcccagctactcgggaagctgaggccgcagaatggcgtgaacccgggaggcggacttgcagtgagcggatatcacgccactgcactcctgcctgggcgacagagcgaaactcgg

SEQ ID NO: 690 - DNA, 650 bp, Homo sapiens
actgtttttctctgcctaacctgggacctgagttctcctggacttgaatctccagccacagagtccagaagcccacacctccacattctgtgactgttccccaaacacagggagaatttgcagaaaatatgcataaaaaccttgccattcttcgcaataaaaccccacattacaaactggcgaaaagggaggattttagcccgaataggtttttcctctatttgaaaccaatcatttcccttttacaatattggagtgaagtttcaaaatcaataagcacctccctcctaggtttatccttacataaagtgccccctctgcacatgaaacattgagtaaaccttgaaaatatgatgctaagtgaaagaagccagtcacgaaagaccacgttttgtaattccatttaaataaaatgtccaaaatagaccaatacatagaaacaaagtacattggtggtggcccagggttaggggagttggggggaaatggagggatatgcggttttcttcagggtaatgaaaatgatctaaaatttattgtggtgctgtttgcacaactgtgcaaatatactgaaaaccgttgaattttacagtttcaatgggtggcttctgtggtatgttattaatatttctcaataaaacttaaaaaaa

SEQ ID NO: 691 - DNA, 676 bp, Homo sapiens
gtcccagttcccgccgtagcgatggccgatttcccagccgcggacgtgaaagcgaggactccacgccgatgacccttcggcgtaccatgtccggcgggcgcttgccaaacagcccaagactgcggaatcacactcgccactgtgtacctagacgccatctgcagacccagcgcctgcggggattccggaaacgggagagcgggcttccggaaacggtgaccaatgggaaacgtgatcagatgttactaggcgaacagtccgtttccaggcaacacagaaggaagagacgctctcagtcaccctaaaatagacggagctttcagccaatggatatgcaggtttgctccagattagccaataagaagtgtttggggccggccgagcgcggcggctcacgcctgtaatcccagcactttgggaggccgaggcgggcggatcacgaggtcagaagatcgagaccatcctggctaacacggtgaaaccccgtctctactaaaaatacgaaaaattaaccagacgtggtggcgggcgcctatagtcccagctactcgggaagctgaggccgcagaatggcgtgaacccgggaggcggagcttgcagtgagcggatatcacgccactgcactcctgcctgggcgacagagcgaaactcggtttcaaaaaacaaaagaagtgct

SEQ ID NO: 692 - DNA, 650 bp, Homo sapiens
actgtttttctctgcctaacctgggacctgagttctcctggacttgaatctccagccacagagtccagaagcccacacctccacattctgtgactgttccccaaacacagggagaatttgcagaaaatatgcataaaaaccttgccattcttcgcaataaaaccccacattacaaactggcgaaaagggaggattttagcccgaataggtttttcctctatttgaaaccaatcatttcccttttacaatattggagtgaagtttcaaaatcaataagcacctccctcctaggtttatccttacataaagtgccccctctgcacatgaaacattgagtaaaccttgaaaatatgatgctaagtgaaagaagccagtcacgaaagaccacgttttgtaattccatttaaataaaatgtccaaaatagaccaatacatagaaacaaagtacattggtggtggcccagggttaggggagttggggggaaatggagggatatgcggttttcttcggggtaatgaaaatgatctaaaatttattgtggtgctgtttgcacaactgtgcaaatatactgaaaaccgttgaattttacagtttcaatgggtggcttctgtggtatgttattaatatttctcaataaaacttaaaaaaa

SEQ ID NO: 693 - DNA, 26190 bp, Homo sapiens
gcaaaatatgttgtatttgtggcatagttcatatttacactatcataaaattatggccgagaagttaaatattctaaatgtgtcaacatagttctctgtaaaactgacttactttccaaatatattttgaaataaaacaatataaaaatgttttctgtttttaggaatggtggaaagcagcagacataattggagtgggttggataagcaaagtgatattcaaaatttaaatgaagagagaatcttagctttacagctttgtgggtggataaagaaaggaacggatgtagacgtggggccatttttgaactcccttgtacaagaaggggaatgggaaagagctgctgctgtggcattgttcaacttggatattcgccgagcaatccaaatcctgaatgaaggggcatcttctgaaaaaggtattaggttataaactaagatattagttataatctaagatgttagcagttcatggaatcttttaaagaaaagaggctaataattttcaaatatctaatcacttaaaattttaatttaatttttgttggaggagaaaacacagcagtatatctataacagtaaatacttagctcatctcttatgccttggtttagggctgtaaaaacaaagatgtgtcttaaatgttagtataatattataaggagtgctcaagtgtgtccattttcaatgttttctcttaaagatagttcacataacattttttaaaatatattttcttaaagattagggctactttagcctacaagtatttttacgatccatatttgagtgttttagtttatactttctttgggatggttattgtttgacctttaagaaactctgaatgacacttttatttaggctaatacaaattgttataaaaagcatactttgatcttcaaattgcttcttgaatctggtgattaaaatacagttttcatttagtattttttaaaaagaaagagataaggtttttttactctggcattttgccagaggatcctcggaaaaacaaatcctaatacaaaacctcaggggtttttttcttatcaggaatatttcgcttggaaataactaaaatatatatagctattggtctttagtacacctaaaaaataatttttgaatattcagaatactgaatccttacttgctggtccattttgaaaccattatagtttagctgtagcatagagaaaaacatgaaattcactgtaattttttttgtagtctaaaagttaaaaaagtcaatgttttgctcagattggcatcttttccttcacctttgctctaacaaaagtctccctcatttaagagtgcaatagaaaataggtgatgatggaaaaaagaattgatatttaaagccatttctaattataattttgctataacttgaaagggtgatactttcctatcttgtgtacctgggaaatttggtggtcgatttaaacacccatactaacaatagggaaaatgtatctttccagtgattttaaggactgaagagaagacttctctgagtcaaacattcttttccatttagaagtaaattgttctatacaaaatccaaagatacttctttgctatttttatttttattttaaaagaccttaaatctaatgtattaggcaaaggaagcaagcacaaagtaacttgggaaagtgtttatagaaatgaggaatataaagctgttaagaacataaagtgggaaacactgctttatttggaaaagaaagaaaaagattagaatcaagaaatagattaagaaaacttatataataagtgtagaaaatacttaaaagtcaaagttaaaggaaaattcagttttttcttttgaagctgaacttcggttagaagactaggcagccatactgctgaaggcaaagttagcagcttatcagcatgcatctaaactgctaagaacaaatgtttaaaagactattggtaacaaatgctttcttgcaaatgggtctaaatgcagttctgtggtaattcttgtagttcattttgtcctggaaaaattgtaagtgtaatactgtaattaaagtattgaaatattactttctgcactttgcattgacacttatatacataagtgtctgcattatatatttaggaataggaaaataaaatgattttgaatattgcagtcttgagatgcaatatttactataagtgtttttgaaatacctttacattaataaacttgttaaagttgacagtgattctggtaggatgacttcacttttcttcatttagtaagcaataacatacatatatgggaacatacacaggaataacttatataagaccctgcctggattgagaacttgaaaagtaaaagatctgcttccctgcacagagtttgcacacatgggcatgagttttataagggtagaaatgttttgcttattgtctttgccaaattttccagtctgaatcaaaacccaaaccccccccttttttttttttttcaagagtaaagtgcaactttattaagaaagtaaaggaataaaagaatggctactccataggcagagcagcccaaaacccttattctctgagctcatttttctgagggtaaaagtcaccctctgatttctatttatggtttaagaaatgtagaagagatattaagcttttgatcactttgattagctggctgtttttaatatgcaggagatctgaatctcaatgtggtagcaatggctttatcgggttatacggatgagaagaactccctttggagagaaatgtgtagcacactgcgattacagctaaataacccgtatttgtgtgtcatgtttgcatttctgacaagtgaaacaggatcttacgatggagttttggtaagctaacttgttttttaagatcttcctttgaattaagataggagtttttatctaactttattaaaattttcaaatgtctgttgcataaaatattatatttttatgcatatgttatttaaaataaggcatcttgggctttttttttgagcagctcttcttgagtgtgattcccgtcctagagttagttaactgataccaaactggatttgatttttatggttttaatataatttacagatatagaaggaataaagattttatcctttagcttaagaactgagctgtagaaatctacagctgtgtaaacataaaaatatattcgctgtttacactgtgcacacatgcacgtgtgtgtgtgtgtgtgtgtgtgtgtgtgtgtgtgtgtgtagttaaataaaacaactcacgattattgatcagttatggtggaggtggccatacatcttgtcccagttagtctttgtggttcctgttaggaatgataacagtacttacagtggactatttcagctttttatttggtctttgtgttattctttttctcttctgttttaaccacctgtgatcataacacaatcaaataggttctttatcacaaaacggggaaagaaagaatgaagtgagatttgcttaccagttttagctattgggttttaagctaaacaatagtactacaactttctttgcactacttggcttctttctagcagtgggaagaactttctacactgaaattcatttctgtgtttgctactgtaccatttcttatcaattatacatttcttgaataagtgatttaaggattagtccctaagaatttgtaaaaatatgtattttattggagcagcttaatgaaatgtttaataaatgtgtattttgcactttatgtactttattacttttaataaattactattgaactttttctgaccaattcaaattaatacgtataatgttaggactttattttttaactgtaattaatcttttttgttaaacagaagactttaaatgtatcttggagagataaaataatgctttcacgaagtgttagagaatgatagagactagataaacaagtggattgttaacttctgaattgataaaagatgtatattgtttaaatattaaatttctgcattttaagttaagtgacccataataagtacttttctttcccttttttttttttttttttttgttgttgttgttgttgtttttgagacagtgtcttgctctgtacccatactggagtgcagtggtgcaatggcagctcactgcaacctccacctcctgggtttaagtgattcttgtgcctcagcctcccaagtagctgagactgcaggcatgcaccaccatgccggctaatttttgtatttttagtagagacggggtttcctcatgttggccagaaatatcaattctggtctcgaactcctgatcttgaatgatccacctgacttggcctcccaaagtgctgggattacagatgtgagccgccatgccctgccccagtatccttgttttgctatacataaatttgagttattagataacagtcatcttgagtacgaagttcatatttccaagctgtttcatttatgtatttagttatactttatgtataaataattataattaatgttgctatttaaaaaatgttaatagtaatgtgaaaagtactgaattgggaagtcggaaaatacaggcctgactccttgctctgccccatttaccatagccattcagttaatttttttgagtattactttctcgagatgtaaaatgggacagaataatgtttataactctttccagatcaaaattttgtaacatatgcaactgaatctaagagttaaatctagttatatgaaatatgttctctctttagggcaaaaccatattttatcatagaaaaaatatgctaagatataggtatcaactgaagtgatcttacggttaaaaaagtaaaattttcataggatgacttcagtggaaattggatcttttttccacccttaaattatttttacaaattacaaaattaattgtaccttcctacatttgtagtaaatatatttcaaaagtgtttcatgatattgacgagtttacaaaaattttagttattataatgcctctgaaatctttgccacaaaccacctatataacaactttagccacaagagtgtgtctgtttatgttttaaaacttgtcactttgtacttggaaacgtatattggtattcttctaagttgtgtactggtgtagccaattcacaaatttcttagacttactgattaacttagtagccaaggaaagatttccttagttctctaaaattaatttctatgatggaaagattatgtggcatcttaaatttgatatactgtgcatcattgcttatgttttatgttatgtaagactgacctggatttttaaaaactgaatttggctagtgtttaaaaggtaaatttttactttgcaaggacaaaaccttattgctgaatttcctaagagttacatcaagaaaggcatctcaggcaattaatggctctgcaagataaatataacttattaataaatttggaaataaacatattcattttatttatataaaacattcagtctctgcaaaaatttaaaaccagtgcgcctagaagtaactccttgctttttctcttctttccagtatgaaaacaaagttgcagtacgtgacagagtggcatttgcttgtaaattccttagtgatactcaggtgaaaactgatttaattccacatttgaagtaattaatatgtactgtcacaattatgtaagaaactagtctttataattacatatgtatgagattgataagctaattcttctaaaaagtatggtaagaatttattagataaaaatattttgaaaatgtctaccataactaaatttatttgtttagaatactgacaatattttagtatatttcttctttggagggtaagattagttagtaggtaaagatgttaaactcacctcttagtgatgctatgaaagggttcctcatttttactacattaaacaatgctaaatgcctatgctgtgtatatagtgagggggaaatgcatgtaaacaaccagtaatactatatgctaagtactataataatgaaaaatgctggggaaagatggaggaatcttggcaagagtttggggtgggttgaagtcagggaagacctaaaggaagttattcttgatgatcttaaagttcccttccaactccagattttgtgattctgttacatactactatgatagacagcaaaaatttcgcagaataatgaggacaattatctttaaaataataaaccatctatagttcttttatggattaattatcaacataataaatgcctttttaaaatattttaaatgattatggatattgctttgaaatttgtaatagatgcagacttcttagttaaatatttatattttagtaaagtcttttgttttaaaatgttttccattaggaatgaaattgttcaaaatgtagttttgaagtacaaaatacatagtgaaacagattgctttagaaaaatcactttaaattttccagttaaatagatacatcgaaaagttgaccaatgaaatgaaagaggctggaaatttggaaggaattttgcttacaggccttactaaagatggagtggacttaatggagagttatgttgatagaactggagatgttcaaacagcaagttactgtatgttacaggtcagtgcagtttgacagcagcttttaaaaaagtaacaatattctatattttctttcctcagttgaaagtaaatatgcacttttgcttgcttaggatctttagaaggcatttagttttaacctaatcagttgatctactgaagacttgtgccttatcttactgtccctaagcctcttcattgagttatccagtttttcctttcagtctgagaagggccagtcttgactgcatctgaatttatgtaaagctcaaattgaatagagaaactctcttcagtttctccaattgttgacataactgcatcttctacaagaaagattggcttttcctgatctcaactatagtcttacttgaagtgctgaagtctagttataccacagctctcagctttcattttctctttttattatcattgggggtatttggggtaaccaatttatccatattttctcaatttttactgtccagtgattaaaaacagattccaggcatagattgctgtctactttacttttgctggaaataatggtaaaatttagagtattctcctgagatttcctgtagccctccagttgatcttatccttacatgatgttggtaccctcctctttcctgccctcatcctcatatcacaatatggtagcatactgtgtactgggtgaacacaggaaaatgccccctctcccactgcaccttcttgtgcatatatagagacactagcccacagaccacaaagtaaacttacctaatgtatcaagccactgcccatggaagaaaaagtacccttctataacattttttcttgttgagataaaattatgtcttttaaattaaagtgtatgtatatggctgtagatggctacagagtgcaaatgagttagtaacttcttaccaagatttataaaatatatttaaaatgcagacaatacagatcttgcttttttaaaatccagtctgataattgctgcctttaattggagtgtttccttcatttacatttatatggtcatggttaagtctaccatcttgctgtttgttttccgttttgtttgtcctttttccttttgttcctatgttcctttcctaccttattttgggttaatatttccatgtttcattttattgcctctattggctttttagctatatctcttttcattatcttttttaaaagatgttgctgtagatctaacaatatgcatccctcaactcatcaaagtcaacattttaccccctcatacttcacatttctcacctgacacatcatgctttctttctactttaccctttcttatgtcactctgacactttctgggttttacttcatgcttcacaaatgtcacaacagtgtgatttcatttacacatccattcctttgtcctattgtcatatattttacttttacagatattatatactccaacttacagtgtttttttaacagtcatttgtcttttatgtaaattatgaaaagaaaacatgggcttttatatttattcacttatttaccattcctggcattctttttcccttctgtaaatcctatagcattccttgtaatataggtgacagattctctcaaattttaactgaaaatgtctatttcactcttattttttctttcaacactttaaagatgtagtttcactgtcttctggcctctgttgtttctgatgagaatcagctgttcttatgcttgtctccctgtctgtgatgtttcattttttgttgggttttttttttttttttgagacagggtctcgctctctcacccaggctggggtggatctcagctcattgcagcctccaggctcaagcaatcctcccacctcagcctcccaaggaactggaccacaggttcacgccaccactcctggctaattttttgtatttttgacagaaatggggtttcaccatgttgcccaggctggtctcaaactcctgacctcaagtgatctgcccgccccggcctccgaaagtgttaggattacaggcatgagccaccacgcccagcctaaattctgatttttaatgtttaagtaaatttgttttccttgcaaccatcaataaaatgttttctattatttatatgtaggataatctttttgggtttcttccaagatttttcctttacctttgatttttcagtagtatgaccttaatgtacctggttgtggttcattttatcctgtttgtggttcactgagcttcttggatctggaagtctgtttttcagcagatttgggaagtacggggatattatttctttaaatatttttttctgcctcaatcttattcggtttttcttctaggactcttattacatatgtattaaaccacttcatagtgttcgtaggtgcctgaggctctattcttcttccttccatgttttttttcccactattcttcaaattggttaattttttttttttttaagacagagtcttgctgtgtcacgcaggctggagtgcagtggcacaatattggctcactgcaacctccacctcccaggttcaagcattcgagtgattctcatgcctcagcctcccgagtagctgggattacaggcatgtgccaccacacctggctaattttttgtatttttagtaggacatggtttcactatgttggccatgctgatcttaaatgcctgtcctcaagtgatctgcccgcctcggcctcccaaagtgctgggattacaggcgcaagccgctgtgcctggcccagatttgttgattctgttgacttattccatcacctctgtctgctgttaaacttcccagggaattgttcatttcagttattgtgcttttcagttacagaatcttaactttgttacagtttactttagcagtccccaacctttttgccccagggactttttagcaccagggggttggtttagggatgattccagcacattgtatttattgtgcactttatttctattattattgcactgtaatacataatgaaataattctacaactcaccataatgtagaatcagtgggagctctgaggttattttcctgcaactagatggtcccatctggggatgatgggagacattgacagatcatcaggcattagattctcataaggagtatgcagcctagatccctcacatgtgcagttcacagtagggttcactgtcctatgagaatctaatgccaccactgatctgacaggaggcagagctcaggcactaatgtgagggatggggagcagccgtaaatacagatgaagctttgcttattgccctgtcactcacctcctgctgtgtgacccagtttgtaccaggctgtggacctgggggtatattgggggttggagccccctggtttacatttctcggttcagattccttatctcttcactaatcaaaacactattttcccaagcccttctgatttggtcagactcaatctctgaactattttcattacagatcatgttgtggcttgattttaggctttattggagaggatctagagaagacttactgtatatgtattgaccaaattcttacttagtttatccccttcttgccatataaggggaaagaatgagatgtgaaaacatcttatttttctgtgaattttctttttaaaccagggattatatgctactttggtacttagttctgcctacttggtcataattagggctagagtagacctctacttttttaagaaatgaaattgtaagctatgtgtttcacatgttcttttagctaaatttaactctggtaattaacactgaatttaatagatgaaagatatgttgcttcagtttttgattggatgtctaaagattatattagctcttacagatttttgttctttttttttataagtaagatatacgccaggttctctctgaaatttcacttttctattggccctcaagtaggactgagaaaactaaccttcagattgatgccaaagcatcattggaagtagagactttctctcctttctccattatgtaaagttaaggaagatatcctggacagggctgaaagtcttctaagaaaacctaaagcggccgggcacggtgactcatgcgtgtaatcccagcactttgggaggccgaggtgggcagattacctgaggtcaggagttcaagaccagcctggccaacatggtgaaaccccatctctactaaaaatacaaaaattaggtggtggcacacccctgtaatcccagctactcaagcaggagaattgcttgagcccgggaggcagaggttgcagtgagccgagatcgtgccactgcgctccagcctggccgacagagtgagactctgtctccaaaaaaaaaaaaaaaagaaaaagaaaagaaaaaaagaaaacctaaagcaagcatagatgaaatgtggaatgtcacagctgccagggaaaatacaactttaggaaaattattactggcaagaacttgaagatcttaatgagaagaactctaaagtaaatttaactaaaacaaggtgttgcttttaactgtggctacgggcaaaagaactaagaaggtatttggtttggttttgctttttcttgttctgttattatttttaaggcaagaaatgtatgttttaattgaaggcaagagtaagaatagacaggtttaacttacagataagtagatatataaaagcagcatctcagttcaccgtgcattgctagataggaaggaccaagctaactgttagttcagatgtgactgagcaattttggtgtgcatttggacttttttttttttttaaatggagtctcattctgtcacccagactacagtgcaacggcacaatctcagctcactgcaacttccgcctcccggttcaggcatcaacctcccaagtaactaggattataggcgcctgccaccacacctggctaatttttgtatttttactagagacagggtttcaccatgttggccaggctggtctcgaactcctgacgtcaagtgatccgcctacctcggccttccaaagtgctgagattacaggcatgagccatcacgcccagcctgtattacatttggatttgatagtaaacagagtttgtgaacccagaggtttttaattgctgggacaaagggtattcgtatcactgtttacaacattcaaccacgaagttctattttcttaaacttaactaaaaggtagagaattagacttccctgggcaggtatgatatataaagtacatatttatgtcattagtggaacccagcttgagataaattaatggagcttccataaattttctttattctcattaggagccagcttttggcaaaaaaaaaaaaaaaggcctatttcttctgtgttactcatacttacatgctacccagaagtctctggcctagccaggagattttaaacaattgaaataattcatgttttcgttttagggttcacctttagatgttcttaaagatgaaagggttcagtactggattgagaattatagaaatttattagatgcctggaggttttggcataaacgagctgaatttgatattcacaggagtaagttggatcccagttccaagcctttagcacaagtaagtacattgttttggagaaaatcaaattgtaacatgttgatgttcaatttaataagttactattagctcattattttgcttatattgagttcccattgatgtctttgtcttttgtagactgaactttgtccttgatcttcctgtcctttggttctgcttcttgctaacaatcatctcagtggcttgagctttagtcgcagatagaacaaaccacagcaggcctgaagttttccagtgtatttccagccctttcagattctaaactattacattatcttataaattccacttgtgtattaagttttttagcattatttatgtgcagtaaggcaggatttgggttttttagactttagcagtattacctatatctatatgtttaattacacatggaaatttttttttagcattagtttaaaaaatgagattgttgtcacataaggtataccacattaaatcactgtgtcttagttcagatattaaatattatgttatcctcaatatgagcactggatggtgctattttcttattttaggaacttgagaaagtgcttatgttaaaaccagagtgttgataaaatagcattacatggtagtacatgttactaatctatatgataagtgattaagagcctagcaatttacggtaaaaacaaaatgaacagcttctattgctattattctaaaaatttaactatttaccattataagtttgttaactctctttgtcttaggaacagcgttttctttataagaaaattttgttcagaagattatatcactgaactgtggtttagaagtcatattgggatattttgtaatggcccagtgtgaattctgaagtcattgttatttctaaaatgttggagtctaaagtttgagttcttccaccaatttcagtggtattagtaagaatataattaaaaaggaagtaccccaaaaatgtaattgctaggtataaattttaaatgaaagctagtcaaccttagcagatcaattttgaaatataaaataaagttttttaaaagtatttaaaaataatttgttaggcgcacactaagttatttagcattccattatggtttgcattacatttattttttctttcatttgttttgtaggtttttgtgagttgcaatttctgtggcaagtcaatctcctacagctgttcagctgtgcctcatcagggcagaggttttagtcagtatggtgtgagtggctcaccaacgaaatctaaagtcacaagttgtcctggctgtcgaaaaccacttcctcgatgtgcgctttgtctcattaatatgggaacaccagtttctagctgtcctggtatgacataattttacaaaatacttttatgaactgaaatgattcttacataattgagttaatgttgcaaataaaatacaaactagctagagttattatttctaagaaagggcagtttactagcttgaaggcttttatgttcctataatttatgaactatgaaaactaaaagcaaaatctatatctattgatacttcaggtaatttcacaagttctgaccaatttaaagtttgtgagaaaaacttaaatatgaaataatcttaatatattaccattttcttatcactgtttccactaagaggagttcgttcaaatttgattatttaaaagtcagtatacccgcacctattaacagatactttgtatttctaaggatcttttgacatcattaaagcactttgacatttcttccttcatcttcaaaacctacctataaaatacatgagagaagggtcagttgcagtggctcatgcctgtaatcccagctctttgagaggccagggtggaaggattacttgagcctgggagtttgagaccagcctgagcaaaatagtgagaccccatctctataaaaaatttttttggccggacatggtggctcacgcctgtaatcccaacactttgggtggccgaggctggcagatcacaaggtcagaagatcaagaccatcctggcaaacatcgtgaaacctcgtctctactaaaaatacaaaaaattagccgggcgtggtggcacacacctgtagtcccagctgcttgggaggctgaggcaggagaattgcttgaacccgggaggcagaggttgcagtgagccaagatcatgccactgcactccagcctgggcgacagagcaagactctgtcctaaatttaaaaaaaaaaaatgtttttaattaaaaaataataataaataagaaaatacatagagaaagtattagcctagaagtcaggtcccttgacttctagattttgatgctgcttctgctgtttgtcagttacctagtaaatttatatatatatatatatatatatatatatatatatatatatatatatatgaaggcaatacgtaatgttttaaatgtacattttagttttgatttaaattttaatcaaggatttttattttatacattgcatactgaccactcttttatgttactctggtcctaataaacagaaaataacaatttggaatatatacatatacacacacacacagtgttcgtttttgtttgtttgtttgttttgttttttgagacaggatctcactctgtcacccaggatagaatgcagtggcatgatctcggctcacggcaacctctgcctactgcctcctgcctcctgggctcaggtgatcctcccacctcagcctcccaagtagctgggaccatagggtttcaccctgttgccctggctggtcttgaactcctgaactcaagcgatccacctgcctcagcttcccaaagtgctgggattacaggcatgagccaccatgcccagcctatattttttaatggttagaaatattaagattattttttattctttatagtaaacatatgggaaaaaattttgagaatagtagataattaaatatcttatacctggtggctggaattattccagctctttacctaacttgaaaatgatactgtggcacaattttcaattaaaatcattttgggtatttggcacacaggtgtaatgaataaagaactggttagagtgtcagaatgtctgttttaattctaactctgtgacatgcagtctgtgacactgagagttacttgcaccttcctctggactggagatcctttctagtgcagacattttataattctattctgtatcgtgttcatttaagtagtctgctttatcattacattaacatttatgaaagacttgctggtatcattggcttagcgattatttttccatctagatgctttttttaaagaaatgaagagaatatgtaatgttttaaatgtacattttagttttgatttaaattttaatcaaggatttttattttatacattacatactgatcactgttttatgttaactctggtcctaataaacagaaaataacaatttggaatatctacaacaatgagagctcgaggtaaaatatagcataaataagacatatatgtgtatgaactgagatatatagaaataattaaatgtaacacatcttttggaccataagcctcaggaagctataaggattatttgcattcttacacctgggcactcttcctttttgctgaataccagtttttcaatcttttctatttttgaaataggtaagaaaagaaaataattttctagaatttgaagaaaaatcttaaaacatttgaaattctttgttatgatgactaatataacgaatagcactcaggtttatcaaatattaacatttttccatatttgttatagaatttttttccatatttgctacagaaataatttctttatatatataatacatatttgaacactgattttacttgatacattaatataatgctgatgtgctgagatgaataaatcaaagaacctcttggagctcttggtgtgcaataagcatagttaacgaatataaaataagtgatattttctagaaaataaatactggtctacaatgccttatctgtcatttcaaagtctctaaaaagatctgaaaatccaatgccttttaaaaataaaattacggtaatctcatttgaccacaaaacctgttcagaattgatgtgaggctattaagatatttatttctcttatttattagtgaatattcatctttcactacagaaatactaacgagtttgattacagggtgctttagacttccctcaaggtgtacatatttgctacttttttctaaaatcccaaacatcctggattctgaaacacatctaaacccccaacatgaattaggactattatataaggaaagaattaggaattttgaaagtgggaaatattacttctatctgaaggatatctggaaagctttaggaggaagttaccatttaagccagtcctttaaagtttggtagatttaatatatgaagattgcagggaagccgtccaggttgcagaccaagtgtaaaaaacatgaactagggtgaagagattggtaagtattatgataagtacagggggtgtttgggaagagcaagtgtattgttgtgaaaggacctaggaagtgaactgataagaaacagtaggaaaattagggagagcctgaatatgatctttaaaggcattgctgagctaagttagagaataatcactctttataatagcaaagacataaaatcaacttcaatgcccatcagtggtggactggataaagaaatgtggtacatacacagcatagaatactatgcagccatgtcttttgcagcagcatggatagagctggaggccattatcctaagcaaactaacacaggaacagaaaaccaaataccacatgttataagtaggagctaaacattgagaacatatggtcataaagaaggaataacagacaccagggcttactggagggtgctaggtgggaggaggatcgaaaaactacctgtcgggtactatgtttattacctggatgatgaaataatccgtacaccaaaacccccatgacacgcaatttacctgtataacaaacctgcacatgtacccctgaaactaaagtaaaagtttaaaaaaaagaaaaagaagcaaattatttttttttggcatgtgaaatcagaaaagtccatttccaaagtaaaacaggatctaatagaaatcaagtgctggataattggataaagagtcaagacccatcagtgtgctgtattcaggaaacccgtctcacgtgcagagacacacataggctcaaaataaagggatggaggaagatctaccaagcaaatggaaaacaaaaaaaggcaggcgttgcaatcctgatctcagataaaacagagtttaaaccaacaaagatcaaaagagacaaggccattacataatggtaaagggatcagttcaacacgaagaactaactatcctaaatatatatgcacccaatacaggagcacccagattcataaagcaagtccttagtgacctacaaagagacttagactcccacacaataataatgggagactttaacaccccactgtcaacattagacagatcaacgaggcagaaagtgaacaaggatatccaggaattgaactccgctctgcaccaagcggacctaatagacatctacagaactctccaccccaaatcaacagcatatacattcttttcagcaccacaccacaccttttccaaaattgaccacatagttggaagtaaagcactcctcagcaaatgtaaaagaacagaaattataacaaactgtctctcagaccacagtgcaatcaaactagaactcaggattaagacattcactccaaaccgctcaactacatggaaactgaacaacgtgctcctgaatgactactgggtacataacgaaatgaaggcagaaataaagatgttctttgaaaccaacgagaacaaagacacaacataccagaatctctgggacacattcaaagcagtgtttagagggaaatttatagcactaaatgcccacgagagtaagcaggaaagatctaaaattgacaccctaacatcacaattgaaagaactagagaagcaagagcaaacacattgaaaagctagcaaaaggcaagaaataactaagatcagagcagaactgaaggaaatagagacacaaaagacccttcaaaaaatcaatgaatccaggagctggttttttttttgaaaagatcaacaaaattgatagactgctagcaagactaataaagaagaaaagagagaaaaatcaaatagacgcaataaaaaatgacaaaggggatatcaccaccgatcccacagaaatacaaactaccatcagagaataccataaacacctctatgcaaataaactagaaaatctagaagaaatggataaattcctggacacatacaccctcccaagactaaaccaggaagaagttgaatctctgaatagaccaataacaggatctgaaattgaggcaatccttaatagcttaccaaccaaaaaaagtccaggaccagatggattcacagccgaactctaccagaggtacaaggaggagctggtaccattccttctgaaactattccaatcaatagaaaaagagggaatcctccccaactcattttatgaggccagcatcatcctgataccaaagactggcagagacacaacaaaaaaagagaattttaggccaatatccttgatgaacattgatgcaaaaatcctcaataaaatactggcaaaccaaatccagcaacacatcaaaaagcttatccaccatgatcaagtgggcttcatccctgggatgcaaggctggttcaacatacgaaaatcaataaatgtaatccagcacataaacagaaccaaagacaaaaaccacatgattatctcaatagatgcagaaaaggcctttgacaaaattcaacaacccttcatgctaaaaactctcaataaattaggtattgatgggatgtatcacgaaataataagagctatctatgacacacccacagccaatatcatactgaatggacaaaaaactggaagcattccctttgaaaactggcacaagacagggatgccctctctcaccactcctattcaacatagtgttggaagttctggccagggcaatcagacaggagaaggaaataaagggcattcatttaggaaaagaggaagtcaaattgtccctgtttgcagatgacatgattgtatacctagaaatccccattgtctcagcccaaaatctccttaagctgataagcaacttcagcaaagtctcaggatacaaaatcaatgtgcagaaatcacaagcattcttatacaccaataacagacaaacagagagccaaatcatgagtgaactcccattcacaattgcttcaaagagaataaaatacctaggaatccaacttacaagggatgtgaaggacctcttcaaggagaactacaaactactgctcaaggaaataaaagaggatacaaacaaatggaagaacattccatgctcatgggtgggaagaatcaatatcatgaaaatggccatactgcccaaggtaatttatagattcagtgccatccccatcaagctaccaatgactttcttcacagaattgaaaaaaactaaagttcatatggaaccaaaaaagagcccgcattgccaagtcaatcccaagccaaaagaacaaagccggaggcatcacactacctgacttcaaactatactacaaggctacagtaaccaaaacagcatggtactggtaccaaaacagagatatagaccaatggaacggaacagagccctcagaaataatgccacctatctacaaccatctgatctttgacaaacctgagaaaaacaagcaatggggaaaggattccctatttaataaatggtgctgggaaaactggctagccatatgtagaaagctgaaactggatcccttccttacaccttatacaaaaattaattcaagatggattaaagacttaaacgttagacctaaaaccgtaaaaaccctagaagaaaggcaataccattcaggacataggcatgggcaaggacttcatgtctaaaacaccaaaagcaatggcaacaaaagccaaaattgacaaatgggatctaattaaactaaagagcttctgcacagcaaaagaaactaccatcagagtgaacaggcaacctacaaaatgggagaaaatttttgcaacctactcatctgacaaagggctaatatccagaagctacaatgaactgaaacaaatttacaagaaaaaaacaaccccatcaaaaactgggcaaaggatatgaacagacacttctcaaaagaagacatttatgcagccaaaaaacacgtgaaaaaatgttcatcatcactggccatcagagaaatgcaaatcaaaaccacaatgagataccatctcacaccagttagaatggcgatcattaaaaagtcaggaaacaacaggtgttggagaggatgtgaagaaataggaacacttttacactgttggtgggactgtaaactagttcaaccattgtggaagtcagtgtggcgattcctcagggatctagaactagaaataccatttgacccagccattctattactgggtatatacccaaaggattataaatcatgctgctataaagacacatgcacacgtatgtttattgcagcactattcacaatagcaaagacttggaaccaagccagatatccaacaatgatagactggattaagaaaatgtggcacatatacaccatggaatactatgcagccataaaaaatgatgagttcatgtcctttgtagggacatggatgaagctggaaaccatcattctcagcaaactatcgcaaggacaaaaatccaaacaccgcatgttctcactgacaggcgggaattgaacaatttgagaacacatggacacagtaaggggaacattacacatcggggactgttgtggggtgcggggaagggggagggatagcattaggagatatacctaatgctaaatgacgagttaatgggtggagcacaccaacatggcacatgtatacatatataacaaacctgcacgttgtgcacatgtaccctaaaactttaataataataaaatttaaaaaaaaataaagtgctggctagtggctcgagtatctaaacctccctggtgctttgcctgcaatcagagattgcatccatccatcatgctttgtgattcaaatagctggaatttctataagcttatttaactgagagttgatatttttatactcaattgtgctttgaagattagaaatctgttgaaacagttctaacatcattataaacattataaatattatttattcaacaaatgtttatttggtacctattgttccaagtgctagaaatgttacagtaaagaagacaaaaatcgctgcccttacagaatttaacttctggacaatgacacattttttaaaagttagattatctactggtttccttcattttcttcttacattatgagttaatgcataagtgaaactctagtttcgcctaaagtgttctgtggcacttgtcttcataattcactataaatcttttaaaatttgaagtcatttgatcttaagcctttatacttggcagtgagatagaccttaatacttccagtttcgtcagaaaaatataaggatatgccttgttctgattcagtctgttatctgtttatgttagaagttacaaaaacaaagtgacaagcactaatgagagctttacacaaaggtgtaaagtagtgtacatatcagatctatattttatttatctcttccccctttcctttttgccctctcattattaattgttggtgaccctttcaggagtaattctagtgtgtttacatctttaatcattgaattacttacacatcctttcacctcatatcattagcaaaaacggatattttttaaaactattcccgactgcaagattatccttttggtcatgaaagcgtgacctgcaatggtccaagcaaaatttttaacatagttatcgatgcataatgtctttatagatagcaattaagtaaaaatattaagtctaattaagcaattgtttaagttacacaagtctcatgaagtgcattgggaaactttctgctttttctcttctttgaaagggcttgtacagatgagaattacctgtcccttgatagatttttttttttttttgagacaaagtcttgctccatcacccagcctggagtgcagcagtgcaatctcggctccctgcagcctccaatccccagatttaagcaattcttgtgcctcagcctcccaagtaggtgggactacaggcatgtgtcaccacccccggccaatttttgtatttttaacagagacggagtttcaccatgttggccagactggtcgtgaactcctagcctcaagtggtctgcccgcctcagcctcccaaagtgctgggattacaggcatgagccatcacacccagccctacctgttccttgaatgttaagtaaaattcacttgtaaactgggcctggtattttccttgtggaaagattttaaactactgatttggtctctccaaagttttaaatttagattgtttcttagtgggtttggatttttttttccatttttatattggctattaaaaatgtaggggagcttctgtcattcagtttcgcttcatctaaactagaacctaccatcaaaattgctatttcaatatgatgtgtgattcatatttggaacacagttttagaaatgctttttgaaagtaactttaaataaaatattatgatatagttaatgaagatcattttattttgtcataggaggaaccaaatcagatgaaaaagtggacttgagcaaggacaaaaaattagcccaatttaacaactggtttacatggtgtcataattgcaggcacggtggacatgctggacatatgcttagttggttcaggtaatcagcacatttcttctttgataggcttggagttatgggggataacacagattgcttctaaatagtttgggtttatctattagcatttagccaaagtatgaattttattttttactgtcactcatgttaacaaaggtggtgtgaacatgtcgtgattagatatcctatgtaaccttaaactataaaggtaatacttatgtaagaactaatttaaatgttttgtatgagttaaatgtttgaataacattatttaactttattcggggagaggatatgtttacagtttttacactgaatattctgtaatttaccatgcaattgaattactaatgaaatgttaaaagagcatatcatacctctgcctcagttctcttctaagtaagctttttatgtagtcacgcaattaagactgtcaagacatatttgaatttcattttgaatggtgccagtggccctgtgctcctggttgatacagcatttatacccagtttgtcttactagctaatttaaactctgagcacatccctgtcaccttcacaactataaatgaaatatcttgccatatatgtagaaagtaaaaggtatgtgtttcttaacttctccctaaacttcagcttggcagtagtttataatttgatgcttttgatgctttttttctctgggttttagtttctatatttttccaaatgccattttgaaaagttgcattatagatagatataagtaaacaggtgggcacagtggtgcacacctgtagtcccagctactcaggaggctgaggcaggaggatcacttgagcccaaaagtgtgcgtacagcctgggaaatatagggagaccctgtctcttaaaaaataaataaataaataaatgtatgtctgtctaatttggatttttaactgttatttgacctatttttttagggaccatgcagagtgccctgtgtcggcatgcacgtgtaaatgtatgcagttggatacaacagggaatctggtacctgcagagactgtccagccataaaatgttaccaccttaagagaacccttcaagtgtggagctttctagtaggtgtccttcatagctcagaaacatacctcagaacaagccattcatgacttacctgtaatgggaaaataaatcattctatcagatcagcagttttgatgtttgagtgattttgatatgcttcacagagacaaatgctgccaaaataaacatcgaagtatagacatgagttctgttcagcaggttgaaaagtctgatttagaaaaactttctaagttttggttgaaattatgaacactctagaagcagaatttctggaagagccaagaacagactttgagcctatatcttcaaagctgaaactggatatctttcaataaaatatgtgcacttttaaaataaaatgactaattctgtgattcagacaatagttttaagttcagctgtgcttagatttctttcagattaatttaaaattacagatttttacttttagaattgcagagcccctatcccacactggagaatattttttattactgtctgttatatatgtgtctatgtgtgtgtgtatatttatgtgtgtatgtataaatatgtattttttaaaggagccttttccctcctttgattttaagataagcaatcttttggcataacattatcgtcttcctagaaaagccaagatgaagaatctatcttacaactttttctcttcagtagagaaaaacatgtaccatttcaggtgaacatacaaaattttcactttctaccttttgccttccaatgtcctgatttgtcttcaaaggtttttctccatattaatttgtcatcttatcctcatcacctgagaacattttactgcatacaaagtctatgcaagattatatgtaactagccatttagtataatctatgtcagtgtttctgtgctgtcaaattccgtcctgatttggaataccataccttgttctttccaaggtagactaggaagtgttggggaaatggggtcacttcagagaccattttagatgtaagtttttaaatgtaagtgttactggggctaagtcaggtactttatttaaaacatttttttttctcatttcatagctagatagttgtaagagaaatacaaagaatttacaagatgcttctctgtcatctgccatatgcagagggactgaactaggaattttgtagttgaagctgtgttcataaagagtaaatcttattttatagattttggagaaataaaacaagaattttaagagctttcgtattagcagttttgccttataaaaactaagatttgtcagattagtttgaggtgtaacctaaatattaaaagtagattaaatttattttttaccttgagtgtctgatacataaaacccttttctaggaaaacattggaagtagtacatatttactctaaatgtctcacctgcatgacagtcttttcaaatgaaagacatggtaattgcaatttttttttaaagattgctattaagggtactttttccagccttcatttgagtaaatcttaattgatttcattttattaacatataccctttacctttaatatttcatttgaagtgttcctttcaaacttactgtcttaaatatgaaagtcagctttaagtaatgtcagactcatatgcattttcattctcattagctaaagtaaaatgtaaaattatctcaaatagttacaagttttggaaatacagtataaaacatgaatgtaaagtctattatgtaatatgcttatttgtaatcctaatatatgagggtgacatttttaagattgtatgtatgtgtcaacctcttaaatgttttctgtgaagcccaaacatgcagtttatgtctctggtgtctgttttgcatttcagtgtgcatggacaatcaaattattttctcatttttatcactaagtcactggtatttgggtttataaactcaacaagatactttacctaaacatgatcaatagatgtgtttattaaaagtgtttttattatttttaaaagattgaataaatctgggttgaagtcattgtatcta

SEQ ID NO: 694 - DNA, 101 bp, Homo sapiens
tggcggggcgggagggcgggccaggacaggaatgcagccgtttttaacagttctgcctacaaccaacaggttgaatgaggaattctagaaactgtctgctg

SEQ ID NO: 695 - DNA, 8053 bp, Homo sapiens
tagttgtataaatcagcaagtatttattttaaataataaaactacagttttataccatacatatttacaaaaatgctttgctatagaaaaatagaatcaatcactgaatccagaccaccacagtggagaacctcctggtgaagctgtgttttttcccacactggaaacacagagtagccctgtttctgcacacgttagtgcaccgctgctacgtgtggccgcccagctgtctgcaggctgtgccgaccactgcctctgtctccaggaagcagaggcagaagtgatccttgctgaggagggccatcgagtctccgcttaaatgccagcacagagagagcactgcaaagtcgcctagagagagacaggtggccagaggattacagcaggggaggcccagattctgggggatgggcacccccttgtcctgcaggccagcacagtgcctggagtgacccacataggcagagccagggtggagccccagagctgcctcaagtcagggagaggctgcttctagcccataaagctgagggcagcgggtcccctgtgtgtccgtcttgaggtttacgcaaagactctgagggcagtttccctggagtgctgccggagacagcagctgggcttcaacagttcagcccgtgtgatgccagactgcacacagcaaggctgccacgtccgtggcctcggggatgtgcttaccttccccaggcacctgcaccgacatgcagcccgctggggaccacaggtagagcctgctgcctcccgtgcagatggccagccgcggctgctgcgggtcccactgaaacgcgcgcactggggacagctgctcgagcaccgcgaacagcctcagcttctgaatgtcccagacccagacggcattgggaatgttgtctgaggaaggaaggacagggcaccggtgtcatccctgcctggctcctctgtgttggccctgcccctctgctctgctgttgacaccacaggaggggaggggaagaaccggtggggtggggcggctgcaccctgcagtctgggttcagttgggccctgtagggctcctggccagggccagggtggccatcacgggctgtaaggggcccaaatgtgtttctttctttggtgttttttttttttttttagccctttacaaatggagaaacccttaacaaaaggcgggctgcagtgtgcccagccctgctttctactcagcagagtggagcaagtgagcagggtggaggcctcctgactcatgcgcggacctgcggctgctgcaggacaaaggcccagcgcctccaaggagcttctgtgagcacctcggctactgcagaaacgtgaaaggaggtgacgtgtcggaaacccccaacttcattttcttttccagtcgcttctacacctggggccacaggacacagtaaagggtgagacagcacctgcgtcagcacaactgaccgttccttgtcgccaggaagtagctgtcaggactaaatgccagcattcctatgcccattttcgggtttgctctgtcggtaacaggtttcagtgtctgtaaggagactgggacagaggcgatctcatctagaacaccaacaggaagaacacgccattgtcaccctttcgggaagtacgcacgcggctgagaggctgctgtgcctgcatcgggcatcgcgaacccagctcctctgttcaaaggggaggaaagtgcggcccaagggcaggaagagctaagcaaagcctggcagccgcagcgaggggcctgcccgcaagtgccccggatgagagtggcaccatcacctgccaggcccgactaggtggggggtggaccccacgtgccaggggctgactggagagggacatggacaggtcctagctgcaatctcagcagctccaactcctcagcacttttctgtcgactaccagcatctgagttcacaatcccttccacctcagcgtcagtacccttagactttccggctgtggaagaaccatcatcacagcagaagcaggggctgtggaacaaggacgcccctgggctcctggggagcgcctcctgtgtgccaggctgcacctgtcctgacccccatcctgagcacacaccgagccccggggtgggcccgtcggcacttggggcaccgcttcctctacctgcaaccttcagatgccctcatgcccctgtgggatgggtgcttttactatgcccatttcagcgatgaggaaacagacacataggaaatgcccagagtcaagaggctgcatcagaaccgggcctcaagccggagacagcgctcgggagcaccgccgggttccagacccactctgagcgccacccacggaaaagtgtttctttgaaaaacatcattctcggagctccggaaaaacatcccctcggagctcccgctgtcagatccgggtctccagggctcatattcagtaacagaagccgcaccttcacggcccactgcgcaattcagaccctagtcaacctccagccaacaggctgaggggcacactggctggaagcatggaagggaaaaaaagtttttttttttaaacataaggaacatccgaagtttatctggacaacgaggaatcttgcattaaaaaaggaaaacaaatgacatcacatgtgctacttacatttactctctgagctcgggagagggccggccccggcccggggcggcgggaaggagaggcagcccagtcccagctgtgggctcttctcggcctccttatacaccacctgaaagacacaaggtggccacgcccggctcaggacagggacccggaagccaaggatggacgtggcaaatgcccatgacagcgcatggtcaacaggtgtgcctgccatgacagctggtcctgctgccaccgggagagacggaagcacgaaccccgcagtcccgagagctgagatcacccagccaccctctctcgtgtcctgctgaggagcccaccctttgagacacaggcagcaaatgtgtgccctgtgattacagacgggagaccactgcagccaccatcatccagcaagggagtgggctcagccttccctccgtgataagaggatacagagaacacttgcaccaacacagcagaggccccgggagcagcagacacagacccgaggtgggggcatctgtgcccgagagcctggcaagcaaaggacagcggcccaggctcagtggaaggcgggcagcccctacgcccctgaagagccccaggtaagggagtcacctggcctggttcatgcctttaaagcatgctctgctgctgtgtggcgaagggatttggagaatgcaggaatcacaggcaaaccttcaggacctgtgtggccagccctgctcgggctcacctgtccagacaccctggcctccagccacacaagccactggccacgtcaggaggcccctctgcctgaaacaccctttctgcccagacaccgcgcagctcctcctcctggtcttcacttaaacacccctccaggatgcatccccggcagtggctgatctggcatgcgcagccccagccactcactggcctcttcatcgaatccaagccgcctttcactcagctctgtcggttacaggtcaacaccaggagggcagcatttgtctctggctcccagcgcagtgcccgctgcacacatggatgcgtggcccactcctcggggcctttgcatttcctgttcccttggcctggaacgctccctccccgagtccctgatcactggtgcagcatctgtgcctgcgatccctcgctggtggccactccctgccaccccgtggagacacccagctctccagccccttccctgtctctccagccgcactctgcaagtgcaggggtctgtctcttcttctctggctgcggcccagagcacagtgcctggcacgacagcagatgcccagtgtttgggggcaggagaccctggccactctgtacagcacagggatctgcatccagacagaccacaaaggagaaaactggactggggtggcagcggcagaggacaggccagggcaaggcccacttcagaccctttgggcagcgtggaggaggaagaacaaaggccagggcagggccagacgcgtgaaatgtcacagtagcaagtttacggtgatggaagtgcccggttaaataataaaccacaatcaagaaagcaaagtgaaggagcagtttcccaccgccctccccaacagcctgctcaggcagaaacacgtgttccagacttactatcttgggatcattaatggctgcaggatgcccaaactccgtgatcattttccaagtcacgtgattaaggatgcgcacctgaggaaggaaaccatgcacaggtgaggcagggcccggcccgctgggcggtcggacttcctgagtgccctgcactggttcccacctttccatcatagctcccaactgccaggaactgactgctggggctccaggccacagacttgatgcccagggaccactcgtaagcgctgtacgtggacaacaaccggccatccaatgagtacagcagaatcttgtactgcagatgagacatttcagttaataatgaatacacccccgtcgccaggaacacaccacagacgcgggtgctgcagagtgacattggtgcagatagcacaaagctggcaggactgtccgcgtggccgtggaaaagctggaactgccagctagtactgagatagtcacggagaggcagtgagagcatgaggaaaaaggggaaattgggaggtcaacctaatggctcgctgataaaagttcaactcggccgggcactgtggctcacgcctgtaatcccagcactttgggaggccgaagctggcagatcacttgaacacagaagttcaagagcagtctgggcaacacggtgaaaccccatctctacaaagaatacaaaaattagccgggcgtggtggtgcatgcttgtggtcccagctacttgggaggctgaggtaggaggatcacttgagtccaggaggtcgaggctgcagtgggccgtgatcacaccactgcactccagcctgggtgacagagcaagaccctgtcttttaaaacaaagctcaacttgttatctgaaataagataaagcaaactatattgcagcattcagaaagcatgaaattccgggaaaagctctcgaaagcaaacatgtcacctggtcatcttcatacctccaagcaggtgtcccacactgccagcacacagccgtttggggcccactcaatccctgtgagatcctgggtgtccgtatcaaaatgcttccaaaggaagggggggaaacattaaatttggaaaatattttcgtaaataaataattgcatttatgactgatgttcttaacgcacttaatttccttatatagaaattgacaaaatctcaacagctctatcctggaaatgcatgaaatccctgtagagctgctgctggggctgcaccgccacagatgccagcgtcagtgcctggccagcccccaagggcggcttggtctccccgcgcctgcactcgtgtgcacactctccccctcacctttccttgcctggccagcccccgagggcggcttggtctccccgcgcctgcactcgtgtgcacactctccccctcacctttccttgcctggccagcccccgaaggtggcttggtctccccgcacctgcactcatgtgcacactctccccctcacctttccttgcctggccaggctcactcctttagacccagctcagacaagtcccttccagagcactgcctggatcccgggttctgcactctgacagcattccagaggttgctctaccttaatgatggattgtgctggaatcgtgttcatatgtctgctgtgggggcagtgccctctgtgcctgggcacctggcagagcgccctgcctaatgcaggccctcagtcaaggtgaacttccacgtccccccaactcccgacgtggcacacacatgcgcaaacaccatcacacaggacaaggaaaagggctcaaatgtgacagcatattcacttttaaaacacctgggcacgcgtccttttcaccaagtctcctgaacacacaaccgggtgccactggaagtgattcgcagcgcacctgccctttgttaatacaacatcaccttgctccatatcctaccaaagatcccctggaatctggaaggatctacttcactcgatccctccacagtcagcaggacaactttattccagtctgggggacgccttacccgcaggagctgccaatcactgcagacgaagatgctcacgtaatctttgcagtcgcgccgttctgccagcgccatgtagcggccgtccctggtgaaggtgattcctgtgggaagaggcaaatgcactgaaatcaagcggccacaaaatcaagcaagagaaaccacagtagtaattcacaaggaaggaggaggaaaagaaagcagaggtgaaaagaagggaaatggcacaatgccgagcactgctcctcagacagacaagaacattctagcgcagaggagaaacccaaggcacggtgccttcaccctcacaacgcagtgtgtgctgggggaagctgtacacacacaggagccggtttgcaaggctctgtcaaaaataccaagtgatgtgacctctgattaatcacaaatatgagtgagaaacacaggccttcgagtccccccatgtctaagctgcgggacacccagggctatctccagctaggcaaaaggcagctggttcctaccatatttattttacctttgaatttaattatttggaagaagtaaactgaagatgaaaatgtgtggccaggcatggtggctcacgcctgtaatcccggcactttgggaggctgaagcaggtgaatcgcttgagcctaggaatttgaaaggagcccagacaacttggtgaaaccccatctctacaaaatatcagccggctgtgatggtgtgtgcctgtagtcccagctactcaggaggctgaggtgagaggatcacttaagcccaggaggtcgaggctgcactgagctgtgatcgtgtcactgcactccagcctgggtgacagagcaagaccctgtctcaaaaaagtaataataagatgaaaatgtggaagaaactttagttgaaaatgttaaactcttattttccagttctgtattagcttaaaaagccctaggccagaattcatcattcctgagtgaaaagaatacctcaaatgacgaaaccacggtgtccactcctatcaagagatatgtatctcatctggagggacgctaatattccaactataagaataagagtgtgactgcattgcattcaaatgcaatttccaaaccgctggcagcaacagagaaaaatgaaagcatcattccaactgtgtatgtttcattccgcaaaaagacagtgcggtgtcgtccaggactcaggagtggcacctcccactagctctgcgcggtccagttagacgcgctggcagtgggccaccctgcgccggccccctttcttccagatggctcacaggcttccacaaggaagggacactggtcacatatccctctgggatgcccagagatgacaggcaagacctccccctttcgcagacatcatatttagtccacagaagagagaaagctcagaactggatgcctgaggtgggcctctcaacaggcatcggctggaaggggtctgaacgcccagctctgccgccaaggtcaaggggaccggcatcaacgccaccgttcttccatgtcttaggccacgttgtcttgagtcactgtggtcatgttttaaaaggggactcttgcctttttgagacacatatggaaatatttacagatgaagtatgaggagacctaaggtctcctttaaaagagcccaagggggttggctatgtgttgatatgctgctgaagctacttctgcctctttgaaacttcccgtgacaaaaaagtcaaacagctgcaaagaaatggcttttgcgtggctccgatcgactcaccctgcagacaagctttcgggtatttgatgtaagacacggattttgtgcacaaggaccagacggttatccg

SEQ ID NO: 696 - DNA, 927 bp, Homo sapiens
gtttgcctgcacactcccagctatggggttgtggctcagtgtattcctttccccagaaggggagccacaggtccccccacagcttctcccaggagcagatcattcattgttgacacctcaacacccagccatggggtggggagctcaaggcatcctcccggcaggtcatcctgggctcccattgctccccagaagtggttccagcttttgtccctctacctcccagtctgcccctagccacaagctggcaattcagttcaggatccttcctgcaggaagggctacaagtgtgctgacactacccgccatgtcccagccatgggaggagatgactcaggcgttcccccattaacttcagagggtccccaggtattatttttgcctatcctccagctagaagttaaaatgcaggaccttctagccaatagggaaaacaggtatactggccgggcatggtggctcatgcctgtaatcaccatactttgggaggctgaggtgggaggatcatttgagcccaggagtttgagtccagcctgggcaacataccaagaccccatctcaaacataaataaataaataaaacaggtatactaacaactgtccccaccatcctgcctatggggttcatgagtctccctacccatccctcctcaccaggaggggtcccaaatatcactctaccatgctcactatctggctgtaggaaagggcatttccgatctgtctaagagagaggatttgacactgactcccacctggagctgtgagctctggaattcaggttttcttttccccagagggcaagccagagtcttcttgtctttccccagtgacttgggagggatacctgatgttatttgttccatattcttatcccccagacatgggttctagagctcagaatgctgctgctggaggggggcctcc

SEQ ID NO: 697 - DNA, 471 bp, Homo sapiens
cagcttcccacaagaggagcccaggttggagagaggtgcagagccatggagttggggactagaaacctctagtgctgggtctcatgacctccgtccaggtttggggctgagaggggagggtcctaccatgtcccacctggttccctcaactccctgccctggctggggtaagtcagaaatctccttgcagtcagagacaagggaaggatccacgtgtatgctcagaagtgagtggggtttggccaggcacagtggctcatgcctgtaatcccagcactttctgaggccaaggccagaggtttgcttgagtccaggagtttgataccagcctgggcaacatagcgacaccccatctcaaaaaagagagacagagggagagagaaaggaaagaaggaaggaaagaaggaagaagagagagaaggaaggaaaagaaggaaggaaggaaagaaagaaagaaagagagagagagag

SEQ ID NO: 698 - DNA, 416 bp, Homo sapiens
ggaaagccctgcactacctgagttcaccctcacaactcagtcccttctctatctctccaagcaggtagaaatgtcctggaagagtctggcctgaacaccaaaagggttcactaatgatttattgctatctcttcctataatcaaatcacccaaaattggttatctaaacccctttcctgtatctgattggtagggaaactttgaaatttgggcaggtacatagacggctgaggggctgttctttatacagatactcagaggtaagtgcctgcctcatgtccgtctctgacccaacagccccttctgggtgcaacattcaacaagggatttaaaccaatcagagtgtgtccagagaatggtggcattcaaactggcaaaacctttcaaaactgtccatctatgaggaatgactataa

SEQ ID NO: 699 - DNA, 129 bp, Homo sapiens
cccagctacttgggaggctgaggcaggagaatcacttgaacctgggaggcggaggttgcagtgagccaagattgcactattgcactccagcctgggcgacaagagcaaaactctgtctcaaaaaaaaaa

SEQ ID NO: 700 - DNA, 502 bp, Homo sapiens
ccctagctggccgtggggatcgaatattctacagggcacttcattctacagtgtgagcccgagctcccggtgcggagatgaggcctggggccgggccgctgcccctcgcccccgggcggggcccaagcaccgccgaccattcccaggcgttggggcccgaggcctagcgcggggcgtccggggagctgtggggagacctggggcggctgttttccgcccttgtaactcgtgatgagttcttccccctcgcttctgtctgcagagaccaataagactgcgggcccttctcctcaacccaggcgcccagccgtccctgggcagatttgcagtttggggaatgtgctcggagagttcccctccccatcatgtgccccttctcctagcggcacgtcacaaatcctggttcagaagtcctcccgggggccgggaaatcaggccaagtggtcgccggcggatgcgccctgccccacatcgccagggggggtaggcaaagcgggcacaa

SEQ ID NO: 701 - DNA, 5441 bp, Homo sapiens
atcccagcactttgggaggccaaggcgggcggatcacgaggtcaggagaccatcctggctagcactgtgaaaccccgcctctactaaaaatacaaaaaattagccggctgtggtggcgtgcgcctgtaatcccagctactcgggaggctgaggcaggagaattgcttgaacctgggaggcggaaattgcagtgagccgagatcgcgccactgcactccagcctgggcgacacagcgagactccgtctcaaaaaaaaaaaaaaaaaaaaaaaaaaagtatgcttactttctataaaaaaaaaaacaaaaaacccaacagctttaatgggatataattcctataccatacaactcgcccattttacagtgtacaatggattttagtatattcacagataagtacaatcatcaccacagtaaattttcaaacattttcatcacctcaagactagttctcaccctctcatcttcccatcctgttcccccaccagccctaagcaaccacaaatccactttttgtctctgtagatttccctagtctggactttcctacgaatggaattatacagcatgtggtcttttgtaattggctttttcactttataatgttttcaatattcatccatattgtaccatatatcagtgcttcatttctttttatgactgtatgacagtccattgtatggattctttccatttttgaataatggagaaagggttggcattttcaaaaggaaatttgccaaaaactgctttgtaagaggtgattaattttaaaatgcacaaacagaaaagtgatcagactcagaaagtgcaggtttctaatcttcacaggtaactcactgaccaccaggagtctcttaggtacttctgagagctgagctcaaagcaagatcccaaacagacaacaataaatgaatgagagatcattctgtcaacctcctatccacagagaaatcctttccacaaaaccctagctcctatttgaaaactgctagcatcagaatttcagttcctctcaaggcaacttattccattttccaacaactcttatggttagaacattcttcaatattgtttctgtccctactggttactgctggaatggcagtggctttaggaactgttttcctgataagatggtagggttggaaggaagctaaactagttcttctttccttaatttagaaatcttcagctacgaaattattgattaggccataaacaacaaacatactctgagcctatttgtggcccagtgtcttaaagtgatgttgatagaattttttaaggttgtggtgggtgataaaaatcaagtgaggcagggcatggtggctcacaccgtaattccaacactttgggaggctgaggcagaaggattgtttgagcccaggagttccagaccagcctgggcaacatggtgaaaccctgtctctacaaaaaatacaaaaattaacccagtgtgatgaggcacgcctgtagtctcagctacttgggaggctgaggtgggaggctcacctgagcccaagaggtcgaggcagcagtgagctgagattgcaccactgcactccagcctgagtgactctgtctcaattaaaaaaaaaaaaatcaagtcagaatatgggaaaatgctttaaaaaccacaaagtattatgacatttttattagcatcagaccactggcttaggcctgactatactgtgtagtggcttcaagaaggaagtgggtaagtatgaagtgaccaaactgcgaaggaagcttgaagtgacaactgaacaaccccaggccccagcaggagagaaacctgatgtaacccaggctgaccttggctttgtagaatgcttggatgaagaagggctcatcagagctaggggtgacacagcctgaaaggagtgcagattcagtagaatttagaagaagagtggagccaatctggaggcaaatgtttctgacaaatgataagatgcaattttcatagagataattgtaagtctatgttcagttcaaagttccatgtgtgaggatgcctggcttgacagctgtttgcatgtaaaagatctggggatttcagatgtgtgcaacctcggttgtgccagcagtgtgacccaactgctaagaatgtcaactgattattaatgcattactatataatgcattagatgctgtggtgtcagggatcacaaaccagccatctatggaacaaatctagcctgcagacagattttgtttggccttccagcactaacttgcaaagtgctgacattaaaaaaaaaaaatcatttgcctccatattgggagatttcacagaaatgccgagattttcagtttctaatgaaaagtcaggactgggtgtggtgcctcacgcctgtaatcccagcactttgggaggctgaggcgggtggatcacctgaggtcaggagttcaagaccagcctggccaacatggcgaaatcccacctctactaaaaatacaaaaattcgccatgcctgtagtcccagctactcggggggctgaggcaggagaatctcttgaacctgagaggcggaggttgcagtgagccaagatcacaccactgtattccagcctgggagacagagtgagaccttgtctaaaaaaaaaaaagccgggccatctggggcccttattcctatatggcaagactgactgcccatcttggatgtgtatgtggctttcggtttgccacggtccctgtcactctccattattctccaacacagaggtaggtgccagctgccttgattcactggcttgctttgctgttttctttatcccaggctcatttcagtcatttgtaccctacagatattgagtgtgtggcctccatatgggtaaagggagggaatcctgttgaactctcagtaggtcagaacacagccagagggctgtgatctgtagaaacaagctcatttaaaattcaacaaaacgaaaccaaagcccaattctttattatggaaaatttcaaacatacacaaaagtagagagaacagtatagttaacccccatgtttccacttttaaagaattgtcaacattgttttatctatatccttcccacaacattcaccccttacctctggaatattttagaggaaatcctagatatggtttaatttaacctgtcaaaacttcagcatatatacccaacaggtaatcacttttttaaaaaagcataaccatggtatcattattacacccaacaagagtaataataattacttagcttcatctcatacctcatctgctttcaaattgctacccatatctctgaaaaatatttttacagaagattggtttgtttgaatcaagatccaaatatgggctgtccttggcatttgattggtgtatcctttaagatatttaaaggataaatctcttttaatctattcgaatttcctctcttttcacccccttttatgacatttctttgttgacctttagaatttcccacagattttggctaattgcatgctcaaggttttcttcagccccatgttcttcaatccctcatggcaattatatctagaagctttataatattcagattatttttcccccaaaatatattctagatggtactgtgtgctattgcaccacaaaagaaagtacataatgtctggctgtcccacatttagaaatatggcttttgattgatgatttcagcatggtcagcagaatccatccattataaaatccttcatcagcctctaatccttcatcagcgtggttggctgaatccatccattataaagtccttcaccagcctctaacctaatgttttagcagccgttgattatcttggtctaaatctattatttttattgaggattccccaatggtgcttttctaattctattattccttctgtatttatgactatggaagcacaattcacataagaaagactggataatttcttgattctttctctttttccaccaatctttgattccctaataatttctaaagataaccaataagttttaaattttaaagcttttctgagttatagtttatgtacaatgaattgcattaataatgttgagtagcttttcatatgcttattagacattaatatatcctctttggtgaagtatttttttgttttttgtttttgagatggggtcttgttttgccccccagcctagagtgcagtggcatgatatcacagcctcaaactcctggattcaagcaatcctcctgcctcagcctccccagtagctgggaccacaggtgcaagccaccactccggtcttctgtctgctttttattgagttgtttctcttttcattattgggttgtagagattttctgtataatctagatgtagttcccttgttggatatataatacgtatattttttgagacagagtcttgctctgtcacccaggctggagtgcagtggtgcaatctcagctcactgcaatctccgcctcccaggttaaaccgattctcctgcctcagccccccaagtagctgggactacaggtgcacaccatcatggccagctaatttttgtatttttagtagagacaaggttcaccatgttggccagactggtcttgaactcctgacctcaggtgatccatccacctcggccacccaaagtgctgggatttcaggcatgcaccactgtgtttggcctgtggatatataatttgtaattacttccagtttgtggcttgggttttcattttctaatatctgttaacgagcaaaatcttaacattttgatgaagttcaattcattgatttctttacccattattgattgtacttttggtgctatatctaaataacctttgtttaactcaaggtcaccaagattttagtccatgatttagttcttatatttaggtttatgctccattttgagttgacttaatttttgtgtatggtgtgaggtaaaggtctcattttgaggggggttggggtatgtgagtatctaaattatggcaccatttgttgaaaagcttattctttcctgatcaaattgccttggcatcttatcaaaaacaagctgtccataaatgtgttgctctattgctgtactatcgttctattctattgacctgtcagtatggtgttatgccaacactacactgtggtgattactgtagatttagagtaagtttggaaaccaggtattataagttctccaattttgttcttctctttcaaaatgcttttggccattgcaggtcctttacattttcatataaattttaggttcagtttaccaatttctatgaaaagttctgcttggattttgatagaaattctgttaaatgtattgatcaagacgttcaacaatttgaggagaattatcttcttcaaaatatgtcttctgcagatcacctgaggtcaggagttcgagaccagcctggcaacatggtgaaaccccatctctactaaaaatacaaa

SEQ ID NO: 702 - DNA, 12744 bp, Homo sapiens
agacggtggagcatggcttcccgcaccagcccagcgccctcggctacagcccgtccctgcgcatcctggccatcggcacccgttctggagccatcaagctgtatcctccgtcccctcgctcccactcgggcagggccttggggtgggtgagatttggggagggacatcttttccttccttgcccgtgggctgttgggataaaatgagggactttcctgatttccagttttggacatgattttattccaaaatggggcaggtatggttgatggtggagcaggcacctgggcatgagtgcatccctggtgggatgcgaccctgtcctttgcaggaggacagtgaggtttgaaatggactgaggagatacaggcttattttgtctcctgtgtcctttcaggaccgttcatgtggtctgctccctttactcagtttcccctctcacctattcctggaggtttcaggaatcccccagtcccgggcagggggtgaggctgctggggggctcagagacctgttttgcaggggttgtattggtggatccagagggaaggacctgacgcccatgtctcagccagtgatcattcagtgagtggctggctggtgcgccagtagcaaggcctaggcccttctgtgcccctgcctccctcagctccccacctcaccaccagaaaagcaagttacagggacccctcttgtcgctagggatgtttttaatttaaaaaaatttttttcggccctttggaaggctgaggcgggcagatcacttgaggtcaggagttcaagaccagcctggtcaatgtggtaaaaccctgtctctactaaaaatattttaaaagttatcagggcgtggtggcacatgcctgtaatcccagctacttgggaggctgagatgggagaatcatttgaacctgggaggcagaggttgcagtgagccaagattgcgccactgcactccagcctgggcaacagagtgagactctgtctcaaaaacttttttttttttttttttttttttttttttttttttttttgtggagacagggtcttgtgatcttgcccagcctggtcttgaactcctgggctcaagcaactctctcgccttggcctctcaaaatgctagggttacaggcatgagtcactgcactcccagcctgcagttttgttttttaacctatctcgataagaatcagaggtggactggccccagggccctatccacaagcagagatggggtggccttgggccaggagagcagggctcggcagctgtcttccaaattccacccccactcccacaggcggcagagagtggagagggctctgcctggcagggacagtccttccccggcctgaggctggatgttgtccagttgggtcatcttttatccagagcactggttctggccgactggggctcccagtgttttcagagatgaaaaaccggatcaggttgggcaccccgccagtctgatctgtgctcccctcagggcagggcccaagggagttgagagatgagggaccacctccaatagcttggctgccacctccagcggagcctgacctccctcttcccctctgcccggtgtgggggaggggtatggagcactcgagttccaggctgggctggtgtacacagggggccagggccttgctgcgggctcagccttccctcggctggttaatcattgccaggccacagccagactctagttaccaatccctggtgccaagactaatgggccaaggctgttggtgataggccccctggggtgccgtgtgttttttcacaggtgctaccaagcgacagccaacatgtcttttgcagctcaggatcagggtggcagcctgacagttgccagggtagggcttcgcctttctatggagttgctcccaccggcctgactgggaaaaatctcccagggatcaggtcactggcctggtgccccagggccagggctgctgtgtctcctccccaccctaggctccatgcatgggtcctgctgcctcgggggagggcagcccctctctgtgtttgcatcattgcacatgggccccgagggcctggcactcaaggcaggcaggggatggtgtccgaccttccagagctttcctgagcctactcctagctacggagccccaggcgtggagttcatggggctgcaccaggagaacaacgctgtgacgcagatccacctcctgcccggccaggtgagggacctggggtgggacaggaagccacttccatgccctcctcgccttcactgcttccagcagggctggtgtggagaggctggcattcggtggccctgggtttgctgctgatggaaagacctgggaccccctccctttccacagctggggctcatgggccaccctgggagtggccagggggtcttttaaacaactggggctgggtggccccagtgtgtaaaggccttgcctgggtagcaagaccacatgatcccgtcgtgtgccctcgccagtgccagctggtcaccctgctggatgacaacagcctgcacctttggagcctgaaggtcaagggcggggcatcggagctgcaggaggatgagagcttcacactgcgtggacccccagggtaagggctcaatccccagccccttccactcccagcccagcctgacccttgcccttagctctggagtggactcaccctttgtgaggcctgttgcgcccctggcagtgactggcatgcgtttggcccgatgcatcgccacactcaggtgctccgagtggagtgggcggggctgcagcctgcctcctccatccacaccacgcctcctccatccgcaccccacctcctccatccgcaccccgcctcctccatccgcaccccgcctcctccatccgcaccccgcctcctccatccgcactccgcctcctccatcggcaccccgcctcctccatctgcaccctgcctcctccatccgcaccccgtgttatgctggagggtccctggcgtctttcctgcctcctagcccaggctctctgccatctgtctcctgtcttggcagaaagtgaccaatgtttgtcctggcttgaaatgttatgacctcattaaagggccttatgggcttgttttccgaggagtcaggggaccccgtccatggcatctcccctgctgggcagtggtcggctcacgggcagctgttcttgtcacagggctgcccccagtgccacacagatcaccgtggtcctgccacattcctcctgcgagctgctctacctgggcaccgagagtggcaacgtgtttgtggtgcagctgccagcttttcgtgcgctggaggaccggaccatcagctcggacgcggtgctgcagcggtgagcccagagcccagctgctgttaactccatcccctcaagttaggcatggcttctccccttggtcccaggactctgtcaggagctgtcatttctctgctgggaattccatggggctatagcaggggaggctcttggcttcctacctgtcacctactgagaacctattggcctgtcataggttagcatcatagcactaaaaagggggctttgagggtccctcgtctaaaggccccaaatgactgtgtaatgtcaccgactgtcagtccagtgtcctttgcacttgccatgggtttcagaaccccaggggctccgcagcggggaagtcgggcccagacctccctgtgtcactggggcagctcctggtgccaccctttgcggtgggtactttgctgaggttccatttgctcgcaggctccgtggctaaaaagccttgaccgccacaggcatgtgggtctgttgagatcgtttcagaagctttgctccttgttgatgatactacattagagagggagttggatcaggtccgggtgggagaaggggacggggcccaaaaaaagagaggagatagcatctgacaagatcatgttggggccgggtcggtcatggtggaatgatctgtggttccaaggggcaggaggaggccagggtgctgggcccctggccctgcaaggctttggactgggcctgggacacactcctgcagctggccagcccagctctccagccctgggtggtgatgaagcagggcccgtctgcccagggcagggcatgactgggctgggaggattcccacttggagctgtgtccctctgagtgcagacctctgcctttcccgttcagcagggtagggctggggcagtgtgtccaaggtcagagcagaacactttgcaggatgacaggtaccacagtgggacacagcctgtgggcaggacggcatgggacctgcgccccagcaggtggccacaccagtgcccagcctcaccctgtagttagctggcgggaatctagtcggcggggggggcccaagtgccctgagagcccctcctgccagtttatttatattatattatattatattttatttcatttttgagatggagtttcactcttgttgcccaggctagagtgcaatggcacgatcttggctcactgcaacctctgcttcctgggttcaagctattctcctgcctcagcctcccgagtagctgggattacaggcatgcgctaccacacccagctaattttgtatttttagtagagacagggtttctccatggtggtcagactagtctcgaactcccgacctcaggtgattgacccgcctcagcctcccagagtgctgggattacaggcatgagccacagcgcctggcccagtttgtttatttatttaaaaaaaaaaaaaaaaaacaaagaaaaaaacattttttttgagagagtcttactctgtcccaggccgaagtgcagtggcaagatctcagctcactgcaacctctgcttcctgggttcaagtgattctcctgcctcagccttctgagtagctgggattacaggtgcacgccatcacacccggcttatttttgtatttttagtagagacggggtttcaccatgttggccaggctggtcttgaactcctgacctcaggtgatccacccacctcggtctcccaaagtgctgggattacaggtgtgagccaccaggcccagccccttttggcagtttaaattctcgtcctcttgatgacacttatctaagtttttaaaacgtgcaaccctttagtctcataactctgtctctgagaagtctctgtcctaaagatataggataagaatgatcattgtagggctgtttttaatggcaaaaagttggaagccctctaattgtctaacaattttcatctgtgtaaggacattatttgcatttattaagaatatctagatggacacagttgctcacactttgggaggctgaggtaggaggattgcttgaggccaggaatttgagactagcctgggcaacatagcaagaccctgtctctccccacaaaaaataaaaattagttgggcaaggcggcacacgtctgcagtctcagctacttgggaggtgggaggatcacttgagcccaggagttggaggctgcagtgagccatgatcaggtcactaccctccagcctgggtgacagaatgagatcctgtctctaaaaagattaaaaattaggccgggcacggtggctcacgcctgtgatcccagcactttgggaggcggaggcgggtggatcacctgagatcaggagttcgagaccagcttgggcaacatggcgaaaccccgtctctactaaaagtataaaaaattagcctggcatggttgtgggtgcctgtaatccctgatactcgggaggctgagcagggagaattgcttgaaccccggaggtggaggttgtggtgagccgaggtcacaccactgcactccagcctgggcaacagagcgagactcccatctcaaaaaaaaaaaattaaatattgaatattaaagtccccttcaactctcactcttgattcaaattctaatgtcagtgaggtcagtgctagcagtagatgtgccagatatagataatgtggagagcttgggtttagtgtggcttgggtccaggctgggtccacttcccacatccttgctgttggctgttggtcctgtgcctgctgccttgtggttttttttgttggctgcaacacctccagccctcacggcagcattccaggcctggagacggggcaggggtcaaggctccagggccaggccaactcacacagagttctgttttatggggctaaaaaacttctttattattaaacactcccttttgcaaaaatgcactgaatatgaatgtacagtttaacagattcttgtagagcatccttgcagccttcctgccgggcatagaaatagaactttgatgccctccggaggtcttatgcacccttcctagtcaaggctccctcttgcccccacattgacttttccagaagtcactgccttgccttgccttataattgtaccgcctgtgtttacatcactggaggttgtgtccatgtctctgtcttgttctacatgctgcccttctccccttggtgacatgtcctagccatctttctttctttttttttggaaatggagtctcactctgtcacccaggctggagtgcagtggcacgatctcggctcactgcaacctccgcctcctgggttcaagcaattctcctgcctccgcctcccaagtagctggggttatagccatgtgccaccacgcccagctaatgttttatatttttagtagagacagggttttgccatgttggccaggctgctctcaaactcctgacctcaagtggcctgcccaccttgggctcccaaagtgctgggattacaggcatgagccaccacgctcggccatccactgcgcccagcccctagccatatttctatgctggcacatggagcagccacctctgcatagggagccccatggctgtgccatgctgggggccattccccctggtggacggcatcggaggctcacggcactcccctcgcccaggttgccagaggaggcccgccaccggcgtgtgttcgagatggtggaggcactgcaggagcaccctcgagaccccaaccagatcctgatcggctacagccgaggcctcgttgtcatctgggacctacagggcagccgcgtgctctaccacttcctcagcagccaggtaggcagtgcccaggacatggcaggcgccatgttgctctcccagggccccaagtggcacatacacactgtgcagaggcatgaggtgcaggcgatgggaacgccgcctcggtccagcgtgctgccctctgtccctctcctcttcctccatagcaactggagaacatctggtggcagcgggacggccgcctgctcgtcagctgtcactctgacggcagctactgccagtggcccgtgtccagcgaagcccagcaaccagagcccctccgcagcctcgtgccttacggtcagtgtttcacccgccaggcagggcccacccccagtgcctcctggattcaggtgcaggttgctcaattctgaagcaaactccggggccagagagggtaaaggctttgtccaaagccacacagcagggttcgcctcacccagtttcttggggaacttctcggagcaagattcccaagcacaggtctaccatgtggatgtggcatgagctagagggatctgtgcctgtggggactgacacttgtctgagagtttgaggatccgttcaagccgattcctttcctttcaggtccctttccttgcaaagcgattaccagaatcctctggctgaccactaggcaggggtaggtatccatgctggtcctctttcctctccagagccttcctggagggctagaaaggtcacttaggcctctgcctgggaagttggtgccagtgaacactctcaggtcccgtgttggggtcttggacaccagggaggggagacagggtagacgctattcacgtctctcagcggcccaattcctgccaagttcattcttgctcctttcttccaccttcccagagagacggtactgagcagcaggtctcaaactcctttagttggcagccctgtttcttcagacaaaatcactctgggtgatgttcaaacagaattgatgggggcacccagcgtgaggcaggagtggctgctgagactcagagcccccagcctggatgccctcaccttacctccaagtcctcctgggctgtagcagttggaaggagatggggtccagtctcccctgctcctggggaccttgactgagtggtgactttgattgccggcctgtggctgttgaggctgtgccaggagccccagcccactgccgctcctctgtgcctgccaggttgcccttcaccatcttccagggtggcatgccacgggccagctacggggaccgccactgcatctcagtgatccacgatggccagcagacggccttcgacttcacctcccgtgtcatcggcttcactgtcctcacagaggcagaccctgcagccagtaggagagcttcgggagtgggtgcccagggttaggtgtgggaggcatggggcaggaccatcagtaaagacagggccaggtgcagtggctcctgcctgtaaccccagtgctgtgggaggccaaggtggtaggatcgcttgaacccaggagttcaagtccagcctggacaacgtagggagacccttgtctctacaaaaaataaaaaaattagccaggtgttgtggcacgtacctgtagtcctagctactcaggaggctgaggtgggaggatcacttgagcctgggaggtggaggttgcagcgaaccaggatcatgctactgtactcagcctgggtgacatagccagactgtgtctcaaaaaaaaaaaaaaaaaaagggctctgcacagatgttcctaagcctaccactgtcctgagtcccttagcctcactgcaccccaaggtgcagtgtcatcaagccctacagctcctttctctgcctccctgccaccctccccagctagagacccagcccagccacacctcctgtctgccccgggctctctgccctttccagactgtaatgggacttagcccacagggggctgatctgtactgttggatttaacacccaccccgctgaggcaagagggtcctggcttagagatggcaaagcccgccttctgggcagggcagaaggtggctgtgcagcctcctggagctccagcaggaccggcagagccctgagtcagcctggtaaattgtgtgacaggcaagaccagaaagggctgatgttgaaacctggagaggagccctgcaggagctctccaggagggagggccctctcctaatgacgctggcctgaaagggcctgaggccgaaaggtgagggggcggggctgttcaggacacctggtctgtgtactcacggcctctatctaccctgttcaggggaaccccaaacctgcttttctttctttctcagcctctcctccctcctcacaccctggatgctgagagcagggcccagctctgctctttccacaacatttgggccatgttggcacagagcgggggcctcttgggctatggtggccacactccccgggctaactgagttacctgattcccagcggaaaggtcaggaagggagggaagaaacttgctgagctacaaattcgagactgctggggctttctaggacaggccaccttcctgcaattgtccctctgtgtccccaactccccgcagtcccgcaggccaggaggtgggtgcctgatgagcggtgcttccctcagatgatatgtgggcaccctgaagctctcacgtaatggttctgctgtgccgggttgtgacccagctgtccttggtaggctctcctgtttaatgagcaactgctatatgccaggccctgttctagaaacagatgaggcccctgttcccatggaacttagatctgagtatgtggacagagtgagtaggttgccagataatgtcagaggtaagaaaaaagccaggcagaggacagcagtgctggtttagacaagggttggcaaggcctccctgataaggggacgtatttgcgcagacacggaagcagtctgatggaaggcttgccctgtagggacctggggtgcagactgagctgggaggactcttggcttgctccaatgaggtaggggcgaagagagggcagaatggcccccgtgctggtccagatgtggccagtgccagatcgtatagagccgtggaggcacggtaaggacttggggtttgagggagatgagggccctgagcaggggtgccatgatctagcctctgctccagaaggatctgtctggctgccatgtgggggacatggagtggagcaaagacaggagcccagtgagagtcgagggagaggtgacctcagcttgggctgcggtgcaggccatgggactggcaggaggtggctggggttacgctgtcttttctaacattcagcattggctcaggggccaggtcagggctcacagactgttgctataaagggctgggtggctttcttccccacagctactcagcctaatgccattgcagagcacatgtagccatggacaacacaaggggcgtatccgtgttccaggacagccatattgacaggaataggcaggaggccagatttggtcctcaggctgtaatttcttggccccttgtctagggagaggtaaacgaggggaggagagatcagtcaaggatgacgtgagggtttgctgggagcaccaggaatcctggagaaggtagtggcaagagggtgcagcaagctcagctgggctgggatcaagtctgaggacttaatgtctcctctgatctccagacccataagggagatgctgagtagacaactggggcttatgggtctggagttcagaggagagatcgggaaggtgtccatttggagtcatccacgcagagatgtgtgaaggctgctcaatgattttgaggtttaaagaaaaaaagagatgtgaaaccaggggccctgatgaggctgcccaggtggtaaggaagacagaagagaagccatgggacagctgagcccgggcaccctcaagccttggaggcatgaagtttggtggggatctggcaaagaacacctgggagcagccagcgggcagcagaccccagagtagcagggaagacaagcacttcaaagaggcagcgtcagccaggggcagtggctcagctgtaatcctagcactttgggaggccaaggatggcagatcacctgaggttaggggttcgagactagcctggccaacatggtgaaaccctgtctctactaaaaataaaaaattagccaggcattggtggcatgtgcctgtaatcccagctactcgagaggctgaggcaggagaatctcttgaacccgggaggcagaggttgcagtgagccgagatcatgccattgcactccagcctgggcaacaagagcgaaactccgtctcaaaaaataaaaaagaaaaacaaaaattagccaggcgtggtggtgagtgcctgtaatcccagctacttgggaagctgaggcaggagaatcgcttgaacccgggaggcggaggttgcagtgagctgagatcgcaccactacactccagcctgggtgacagagcaagactccatctcaaaaaaaaaagagaaaaaaaaggctgggcacagtggctcatgcctgtaatcccagcattttgggaggccaaggtgggaagatcacttgagcccaggagttcaacaccagcctgagcaacatggcgaaaccctgtctctaccaaaaatacaaaagttagctgggtatcgtggctcacacctgtaatcccagctacttgggagcctgaggcaggaggattgcttgaacctggaggtggaggttgcaatgagccgagatcacaccactgtactccagcctgggcgacagagtgtgaaaccctgtctcaagaaaagaaaagaaaaaaaaaagacaaatggtttaatcatccagcgcacatttattgagcactagctgggtccaggcctgagtgaggtgatgtgattgtgtgcagtaaagaaaatgccacccctagcaactggtgtgctgaagaccacgcgtgctgctgcctgtggggagaggcttgacaggtgcatctgagcagggagagcaggccccatggaggagaaaccagggaagagggttggcaggcacagctgcatgcctctggggtgcctatcctggttgggaccctgccttccagccaggtgtatccccccaggagccctgtgccagggagctctcagcagccttgcatgcagagccagggctactgcccacacctgctgccctcctggagatggaaaggctttgctcaagcagccaagaacagggctttctggatctgcagatgccctggctccaaccctggagcttctgattccacagagctgggctgcttcctcctggccccggcccctgacccttgccctgtaccccagcctttgacgacccctatgccctggtggtgctggctgaggaggagctggtggtgattgacctgcagacagcaggctggccaccggtccagctgccctacctggcttctctgcactgttccgccatcacctgctctcaccacgtctccaacatcccgctgaagctgtgggagcggatcattgccgccggcagccggcagaacgcacacttctccaccatggtaggtctggccctggccccagccccagccccaccgcaagccaaactctcccatggacttcttggtctctttttctaggagtggccaattgatggtggcaccagcctgaccccagccccacccc

SEQ ID NO: 703 - DNA, 12683 bp, Homo sapiens
agacggtggagcatggcttcccgcaccagcccagcgccctcggctacagcccgtccctgcacatcctggccatcggcacccgttctggagccatcaagctgtatcctccgtcccctcgctcccactcgggcagggccttggggtgggtgagatttggggagggacatcttttccttccttgcccgtgggctgttgggataaaatgagggactttcctgatttccagttttggacatgattttattccaaaatggggcaggtatggttgatggtggagcaggcacctgggcatgagtgcatccctggtgggatgcgaccctgtcctttgcaggaggacagtgaggtttgaaatggactgaggagatacaggcttattttgtctcctgtgtcctttcaggaccgttcatgtggtctgctccctttactcagtttcccctctcacctattcctggaggtttcaggaatcccccagtcccgggcagggggtgaggctgctggggggctcagagacctgttttgcaggggttgtattggtggatccagagggaaggacctgacgcccatgtctcagccagtgatcattcagtgagtggctggctggtgcgccagtagcaaggcctaggcccttctgtgcccctgcctccctcagctccccacctcaccaccagaaaagcaagttacagggacccctcttgtcgctagggatgtttttaatttaaaaaaatttttttcggcactttgggaggctgaggcgggcagatcacttgaggtcaggagttcaagaccagcctggtcaatgtggtaaaaccctgtctctactaaaaatattttaaaagttatcagggcgtggtggcacatgcctgtaatcccagctacttgggaggctgagatgggagaatcgtttgaacctgggaggcagaggttgcagtgagccaagattgcgccactgcactccagcctgggcaacagagtgagactctgtctcaaaaactttttttttttttgtggagacagggtcttgtgatcttgcccagcctggtcttgaactcctgggctcaagcaactctctcgccttggcctctcaaaatgctagggttacaggcatgagtcactgcactcccagcctgcagttttgttttttaacctatctcgataagaatcagaggtggactggccccagggccctatccacaagcagagatggggtggccttgggccaggagagcagggctcggcagctgtcttccaaattccacccccactcccacaggcggcagagagtggagagggctctgcctggcagggacagtccttccccggcctgaggctggatgttgtccagttgggtcatcttttatccagagcactggttctggccgactgggggctcccagtgttttcagagatgaaaaaccggatcaggttgggcaccccgccagtctgatctgtgctcccctcagggcagggcccaagggagttgagagatgagggaccacctccaatagcttggctgccacctccagcggagcctgacctccctcttcccctctgcccggtgtgggggaggggtatggagcactcgagttccaggctgggctggtgtacacagggggccagggccttgctgcgggctcagccttccctcggctggttaatcattgccaggccacagccagactctagttaccaatccctggtgccaagactaatgggccaaggctgttggtgataggccccctggggtgccgtgtgttttttcacaggtgctaccaagcgacagccaacatgtctcttgcagctcaggatcagggtggcagcctgacagttgccagggtagggcttcgcctttctatggagttgctcccaccggcctgactgggaaaaatctcccagggatcaggtcactggcctggtgccccagggccagggctgctgtgtctcctccccaccctaggctccatgcatgggtcctgctgcctcgggggagggcagcccctctctgtgtttgcatcattgcacatgggccccgagggcctggcactcaaggcaggcaggggatggtgtccgaccttccagagctttcctgagcctactcctagctacggagccccaggcgtggagttcatggggctgcaccaggagaacaacgctgtgacgcagatccacctcctgcccggccaggtgagggacctggggtgggacaggaagccacttccatgccctccttgccttcactgcttccagcagggctggtgtggagaggctggcattcggtggccctgggtttgctgctgatggaaagacctgggaccccctccctttccacagctggggctcatgggccaccctgggagtggccagggggtcttttaaacaactggggctgcgtggccccagtgtgtaaaggccttgcctgggtagcaagaccacatgatcccgtcgtgtgccctcgccagtgccagctggtcaccctgctggatgacaacagcctgcacctttggagcctgaaggtcaagggcggggcatcggagctgcaggaggatgagagcttcacactgcgtggacccccagggtaagggctcaatccccagccccttccactcccagcccagcctgacccttgcccttagctctggagtggactcaccctttgtgaggcctgttgcgcccctggcagtgactggcatgcgtttggcccgatgcatcgccacactcaggtgctccgagtggagtgggcggggctgcagcctgcctcctccatccacaccacgcctcctccatccgcaccccacctcctccatccgcaccccgcctcctccatccgcaccccgcctcctccatccgcaccccgcctcctccatctgcaccccgcctcctccatccgcaccccgtgttatgctggagggtccctggcgtctttcctgcctcctagcccaggctctctgccatctgtctcctgtcttggcagaaagtgaccaatgtttgtcctggcttgaaatgttatgacctcattaaagggccttatgggcttgttttccgaggagtcaggggaccccgtccatggcatctcccctgctgggcagtggtcggctcacgggcagctgttcttgtcacagggctgcccccagtgccacacagatcaccgtggtcctgccacattcctcctgcgagctgctctacctgggcaccgagagtggcaacgtgtttgtggtgcagctgccagcttttcgtgcgctggaggaccggaccatcagctcggacgcggtgctgcagcggtgagcccagagcccagctgctgttaactccatcccctcaagttaggcatggcttctccccttggtcccaggactctgtcaggagctgtcatttctctgctgggaattccatggggctatagcaggggaggctcttggcttcctacctgtcacctactgagaacctattggcctgtcataggttagcatcatagcactaaaaagggggctttgagggtccctcgtctaaaggccccaaatgactgtgtaatgtcaccgactgtcagtccagtgtcctttgcacttgccatgggtttcagaaccccaggggctccgcagcggggaagtcgggcccagacctccctgtgtcactggggcagctcctggtgccaccctttgcggtgggtactttgctgaggttccatttgctcgcaagctccgtggctaaaaagccttgaccgccacaggcatgtgggtctgttgagatcgtttcagaagctttgctccttgttgatgatactacattagagagggagttggatcaggtccgggtgggagaaggggacggggcccaaaaaaagagaggagatagcatctgacaagatcatgttggggccgggtcggtcatggtggaatgatctgtggttccaaggggcaggaggaggccagggtgctgggcccctggccctgcaaggctttggactgggcctgggacacactcctgcagctggccagcccagctctccagccctgggtggtgatgaagcagggcccgtctgcccagggcagggcatgactgggctgggaggattcccacttggagctgtgtccctctgagtgcagacctctgcctttcccgttcagcagggtagggctggggcagtgtgtccaaggtcagagcagaacactttgcaggatgacaggtaccacagtgggacacagcctgtgggcaggacggcatgggacctgcgccccagcaggtggccacaccagtgcccagcctcaccctgtagttagctggcgggaatctagtcggcgggggggcccaagtgccctgagagcccctcctgccagtttatttatattatattatattatattttatttcatttttgagatggagtttcactcttgttccccaggctagagtgcaatggcacgatcttggctcactgcaacctctgcttcctgggttcaagctattctcctgcctcagcctcccgagtagctgggattacaggcatgcgctaccacacccagctaattttgtatttttagtagagacagggtttctccatggtggtcaaactagtctcgaactcccgacctcaggtgattgacccgcctcagcctcccaaagtgctgggattacaggcatgagccacagcgcctggcccagtttgtttatttattaaaaaaaaaaaaaaaaaaaaaaaaaaaacccaaagaaaaaacattttttttgagagagtcttactctgtcccaggccgaagtgcagtggcaagatctcagctcactgcaacctctgcttcctgggttcaagtgattctcctgcctcagccttccgagtagctgggattacaggtgcacgccatcacacccggcttatttttgtatttttagtagagacggggtttcaccatgttggccaggctggtcttgaactcctgacctcaggtgatccacccacctcggtctcccaaagtgctgggattacaggtgtgagccaccaggcccagccccttttggcagtttaaattctcgtcctcttgatgacacttatctaagtttttaaaacgtgcaaccctttagtctcataactgtctctgagaagtctctgtcctaaagatataggataagaatgatcattgtagggctgtttttaatggcaaaaagttggaagccctctaattgtctaacaattttcatctgtgtaaggacattatttgcatttattaagaatatctagatggacacagttgctcacactttgggaggctgaggtaggaggattgcttgaggccaggaatttgagactagcctgggcaacatagcaagaccctgtctctcctcacaaaaaataaaaattagttgggcaaggcggcacacgtctgcagtctcagctacttgggaggtgggaggatcacttgagcccaggagttggaggctgcagtgagccatgatcaggtcactaccctccagcctgggtgacagaatgagatcctgtctctaaaaagattaaaaattaggccgggcgcggtggctcacgcctgtgatcccagcactttgggaggcggaggcgggtggatcacctgagatcaggagttcgagaccagcttgggcaacatggcgaaaccccgtctctactaaaagtataaaaaattagcctggcatggttgtgggtgcctgtaatccctgatactcgggaggctgagcagggagaattgcttgaaccccggaggtggaggttgtggtgagccgaggtcacaccactgcactccagcctgggcaacagagcgagactcccatctcaaaaaaaaaaaattaaatattgaatattaaagtccccttcaactctcactcttgattcaaattctaatgtcagtgaggtcagtgctagcagtagatgtgccagatatagataatgtggagagcttgggtttagtgtggcttgggtccaggctgggtccacttcccacatccttgctgttggctgttggtcctgtgcctgctgccttgtggtttttttgttggctgcaacacctccagccctcacggcagcattccaggcctggagacggggcaggggtcaaggctccagggccaggccaactcacacagagttttgttttatggggctaaaaaacttctttattattaaacactcccttttgcaaaaatgcactgaatatgaatgtacagtttaacagattcttgtagagcatccttgcagccttcctgccgggcatagaaatagaactttgatgccctccggaggtcttatgcacccttcctagtcaaggctccctcttgcccccacattgacttttccagaagtcactgccttgccttgccttataattgtaccgcctgtgtttacatcactggaggttgtgtccatgtctctgtcttgttctacatgctgcccttctccccttggtgacatgtcctagccatctttctttctttttttttggaaatggagtctcactctgtcacccaggctggagtgcagtggcacgatctcggctcactgcaacctccgcctcctgggttcaagcaattctcccgcctccgcctcccaagtagctggggttatagccatgtgccaccacgcccagctaatgttttatatttttagtagagacagggttttgccatgttggccaggctgctctcaaactcctgacctcaagtggcctgcccaccttgggctcccaaagtgctgggattacaggcatgagccaccacgctcggccatccactgcgcccagcccctagccatatttctatgctggcacatggagcagccacctctgcatagggagccccatggctgtgccatgctgggggccattccccctggtggacggcatcggaggctcacggcactcccctcgcccaggttgccagaggaggcccgccaccggcgtgtgttcgagatggtggaggcactgcaggagcaccctcgagaccccaaccagatcctgatcggctacagccgaggcctcgttgtcatctgggacctacagggcagccgcgtgctctaccacttcctcagcagccaggtaggcagtgcccaggacatggcaggcgccatgttgctctcccagggccccaagtggcacatacacactgtgcagaggcatggggtgcaggcgatgggaacgccgcctcggtccagcgtgctgccctctgtccctctcctcttcctccatagcaactggagaacatctggtggcagcgggacggccgcctgctcgtcagctgtcactctgacggcagctactgccagtggcccgtgtccagcgaagcccagcaaccagagcccctccgcagcctcgtgccttacggtcagtgtttcacccgccgggcagggcccacccccagtgcctcctggattcaggtgcaggttgctcaattctgaagcaaactccagggccagagagggtaaaggctttgtccaaagccacacagcagggttcgcctcacccagtttcttggggaacttctcggagcaagattcccaagcacaggtctaccatgtggatgtggcatgagctagagggatctgtgcctgtggggactgacacttgtctgagagtttgaggatccgttcaagccgattcctttcctttcaggtccctttccttgcaaagcgattaccagaatcctctggctgaccactaggcaggggtaggtatccatgctggtcctctttcctctccagagccttcctggagggctagaaaggtcacttaggcctctgcctgggaagttggtgccagtgaacactctcaggtcccgtgttggggtcttggacaccagggaggggagacagggtagacgctattcacgtctctcagcggcccaattcctgccaagttcattcttgctcctttcttccaccttcccagagagacggtactgagcagcaggtcttaaactcctttagttggcagccctgtttcttcagacaaaatcactctgggtgatgttcaaacagaattggtgggggcacccagcatgaggcaggagtggctgctgagactcagagcccccagcctggatgccctcaccttacctccaagtcctcctgggctgtagcagttggaaggagatggggtccagtctcccctgctcctggggaccttgactgagtggtgactttgattgccggcctgtggctgttgaggctgtgccaggagccccagcccactgccgctcctctgtgcctgccaggttgcccttcaccatcttccagggtggcatgccacgggccagctacggggaccgccactgcatctcagtgatccacgatggccagcagacggccttcgacttcacctcccgtgtcatcggcttcactgtcctcacagaggcagaccctgcagccagtaggagagcttcgggagtgggtgcccagggttaggtgtgggaggcatggggcaggaccatcagtaaagacagggccaggtgcagtggctcctgcctgtaaccccagtgctgtgggaggccaaggtggtaggatcgcttgaacccaggagttcaagtccagcctggacaacgtagggagacccttgtctctacaaaaaataaaaaaattagccaggtgttgtggcacgtacctgtagtcctagctactcaggaggctgaggtgggaggatcacttgagcctgggaggtggaggttgcagcgaaccaggatcatgctactgtactcagcctgggtgacatagccagactgtgtctcaaaaaaaaaaaaaaaaaagggctctgcacagatgttcctaagcctaccactgtcctgagtcccttagcctcactgcaccccaaggtgcagtgtcatcaagccctacagctcctttctctgcctccctgccaccctccccagctagagacccagcccagccacacctcctgtctgccccgggctctctgccctttccagactgtaatgggacttagcccacagggggctgatctgtactgttggatttaacacccaccccgctgaggcaagagggtcctggcttagagatggcaaagcccgccttctgggcagggcagaaggtggctgtgcagcctcctggagctccagcaggaccggcagagccctgagtcagcctcgtaaattgtgtgacaggcaagaccagaaagggctgatgttgaaacctggagaggagccctgcaggagctctccaggagggagggccctctcctaatgatgctggcctgaaagggcctgaggccgaaaggtgagggggcggggctgttcaggacacctggtctgtgtactcacggcctctatctaccctgttcaggggaaccccaaacctgcttttctttctttctcagcctctcctccctcctcacaccctggatgctgagagcagggcccagctctgctctttccacaacatttgggccatgttggcacagagcgggggcctcttgggctatggtggccacactccccgggctaactgagttacctgattcccagcggaaaggtcaggaagggagggaagaaacttgctgagctacaaattcgagactgctggggctttctaggacaggccaccttcctgcaattgtccctctgtgtccccaactccccgcagtcccgcaggccaggaggtgggtgcctgatgagcggtgcttccctcagatgatatgtgggcaccctgaagctctcacgtaatggttctgctgtgccgggttgtgacccagctgtccttggtaggctctcctgtttaatgagcaactgctatatgccaggccctgttctagaaacagatgaggcccctgttcccatggaacttagatctgagtatgtggacagagtgagtaggttgccagataatgtcagaggtaagaaaaaagccaggcagaggacagcagtgctggtttagacaagggttggcaaggcctccctgataaggggacgtatttgcgcagacacggaagcagtctgatggaaggcttgccctgtagggacctggggtgcagactgagctgggagggctcttggcttgctccaatgaggtaggggcgaagagagggcagaatggcccccgtgctggtccagatgtggccagcgccagatcgtatagagccgtggaggcacggtaaggacttggggtttgagggagatgagggccctgagcaggggtgccatgatctagcctctgctccagaaggatctgtctggctgccatgtgggggacacggagtggagcaaagacgggagcccagtgagagtcgagggagaggtgacctcagcttgggctgcggtgcaggccatgggactggcaggaggtggctggggttacgctgtcttttctaacattcagcattggctcaggggccaggtcagggctcacagactgttgctataaagggctgggtggctttcttccccacagctactcagcctaatgccattgcagagcacatgtagccatggacaacacaaggggcgtatccgtgttccaggacagccatattgacaggaataggcaggaggccagatttggtcctcaggctgtaatttcttggccccttgtctagggagaggtaaacgaggggaggagagatcagtcaaggatgacgtgagggtttgctgggagcaccaggaatcctggagaaggtagtggcaagagggtgcagcaagctcagctgggcggggatcaagtctgaggacttaatgtctcctctgatctccagacccataagggagatgctgagtagacaactggggcttatgggtctggagttcagaggagagatcgggaaggtgtccatttggagtcatccacgcagagatgtgtgaaggctgctcaatgattttgaggtttaaagaaaaaaagagatgtgaaaccaggggccctgatgaggctgcccaggtggtaaggaagacagaagagaagccatgggacagctgagcccgggcaccctcaagccttggaggcatgaagtttggtggggatctggcaaagaacacctgggagcagccagcgggcagcagaccccagagtagcagggaagacaagcacttcaaagaggcagcgtcagccaggggcagtggctcagctgtaatcctagcactttgggaggccaaggatggcagatcacctgaggttaggggttcgagactagcctggccaacatggtgaaaccctgtctctactaaaaataaaaaattagccaggcattggtggtatgtgcctgtaatcccagctactcgagaggctgaggcaggagaatctcttgaacccgggaggcagaggttgcagtgagccgagatcatgccattgcactccagcctgggcaacaagagcgaaactccgtctcaaaaaataaaaaagaaaaacaaaaattagccaggcgtggtggtgagtgcctgtaatcccagctacttgggaagctgaggcaggagaatcgcttgaacccgggaggcggaggttgcagtgagctgagatcgcaccactacactccagcctgggtgacagagcaagactccatctcaaaaaaaaaagagaaaaaaaagactgggcacagtggctcatgcctgtaatcccagcattttgggaggccaaggtgggaagatcacttgagcccaggagttcaacaccagcctgagcaacatggcgaaaccctgtctctaccaaaaatacaaaagttagctgggtatcgtggctcacacctgtaatcccagctacttgggagcctgaggcaggaggatcgcttgaacctggaggtggaggttgcaatgagccgagatcacaccactgtactccagcctgggcgacagagtgtgaaaccctgtctcgagaaaagaaaaaaaaaaaaaaagacaaatggtttaatcatccagcgcacatttattgagcactagctgggtccaggcctgagtgaggtgatgtgattgtgtgcagtaaagaaaatgccacccctagcaactggtgtgctgaagaccacgcgtgctgctgcctgtggggagaggcttgacaggtgcatctgagcagggagagcaggccccatggaggagaaaccagggaagagggttggcaggcacagctgcatgcctctggggtgcctatcctggttgggaccctgccttccagccaggtgtatccccccaggagccctgtgccagggagctctcagcagccttgcatgcagagccagggctactgcccacacctgctgccctcctggagatggaaaggctttgctcaagcagccaagaacagggctttctggatctgcagatgccctggctccaaccctggagcttctgattccacagagctgggctgcttcctcctggccccggcccctgacccttgccctgtaccccagcctttgacgacccctatgccctggtggtgctggctgaggaggagctggtggtgattgacctgcagacagcaggctggccaccggtccagctgccctacctggcttctctgcactgttccgccatcacctgctctcaccacgtctccaacatcccgctgaagctgtgggagcggatcattgccgccggcagccggcagaacgcacacttctccaccatggtaggtctggccctggccccagccccagccccaccgcaagccaaactctcccatggacttcttggtctctttttctaggagtggccaattgatggtggcaccagcctgaccccagccccacccc

SEQ ID NO: 704 - DNA, 6252 bp, Homo sapiens
ctgcccacaggcacgaggacggcacggtgcggttctgggatgcctcgggtgtctgcctgcggctgctctacaaactcagcactgtgcgcgtgttcctcaccgacacggaccccaacgagaacctcagtgcccagggcgaggacgagtggcccccactccgcaaggtgaggccaggagcctgggacccaggaagggcagaggccagctgggtccagtccccgtggctgctcacagggcccctccccttctccaggtgggctcctttgacccctacagtgatgacccccggctgggcatccagaagatcttcctctgcaagtacagcggctacctggctgtggcaggcacggcagggcaggtagcaggctgggctggggagggggagctggggaggagtggtcgatgactggggacagcagggacaggagccaaccacctgcctaacgcacattctgtgtcctgtgcttttccggtggatggaggtggcttgatccccttggcgggaggtccctgggatggttgtttcttctccagaaatcggaattaagggctgggccgggcacggtggctcatgcctgtaatcccagcactttgggagaccaaggcaggcggatcacctgaggtcaggagttcgagaccagcctggccaacatggtgaaaccccatctctactaaaaatataaaaattagccaggcatttgtggctcgtgcctgtaatcccagctactggaaggccgagacaagagaatcacttgaacctgggaggcagaggttgcagtgagccgagattgtgccactgcgctccagcctgggcaacagagcaagacttgtctcaaaaaaaaaaaaaaaatgcaggagagctggggttggacagaggcctttgtccttccttgagccttgggcccagctcctttgctgtccccactagtagcatcctgcggccctgccgtccctttgctgagggcttgctgagccacctgccaccctgcgcaggtgctggtactggaactgaatgacgaggcagcggagcaggctgtggagcaggtggaggccgacctgctgcaggaccaagagggctaccgctggaaggggcacgagcgcctggcagcccgctcagggcccgtgcgctttgagcctggctttcagcccttcgtgttggtgcagtgtcagcccccggctgtggtcacctccttggccctgcactctgagtggcggctcgtggccttcggcaccagccatggctttggcctctttgaccaccagcagcggcggcaggtctttgttaagtgagcaggggcggctgggtcccggggctgggagtggggcccgcgaggactcccaggacctagcagcactgacagcctgccatccccccaaggtgcacactgcaccccagtgaccagctggccttggagggcccactctcccgcgtcaagtccctcaagaagtccttgcgtcagtcattccgccggatgcgtcggagccgggtgtccagccggaagcggcacccggctggccccccaggagaggtgaggcctgaggtgaggctgcggccggccacgcacccaggttcggctcagagcagccagcaggggggccacacggcccctgctccccaggcttgctaggctacaaacaagattcagggtccaggtcgcattgtgtgacctcagacaggtcacgctgcttctctctgcctcagcttcctgagcagaaaggcagtaactgtaatgcttatcctagaagtaatccccagtaaacgttagtgatttcctttttctctctacaacatgctgggggcccaggcaggctcccccaagggcacctccctcttggacaagggtccctctagacgcaggcctggcaggtggctggcatggctgtggcctgccttccgatgcaaggatcagcactgagcgaagcactgttcctggggaggggagtccagagctgacccttaggctggcccaccccttgcaggcacaggaggggagtgccaaggctgagcggccaggcctccagaacatggagctggcgcctgtgcagcgcaagatcgaggctcgctcggcagaggactccttcacaggcttcgtccggaccctgtactttgctgacacctacctgaaggacagtgagtggccagcctggggttggggggcagggggtagtgggcagcagacaccccctgacctgggggcatgccgggggctgctgcctgcctggctggtaggagctaagaggtttccccttgtgagcaggggcagactgcagcccctgcctgcttactcccctcccctgcctcggcctctgagtcagcttcccttggctttatatccaggccgtagcaccctttagaagcatggcctcagacccatcacttagcctttcagggcctcagcttgcttctctgtaaatgaggaagtgacagcttcctcctagagcagctgtgacgatcggggacagcagagcctgctggtctccagaggacgtgtctctccctggctggttctcccctgctgtatcacagcaagggctgagctgacctgggattggggtcttctatgttggggcctgtgtggttgtcagagagccttccagcctctcccaggagggaaaacctgggagtaaaccctggttgcccagctccacccgactcccacgctaagggtcagacacccaaacatggcttctcggcaggctcccggcactgcccctcgctgtgggctggcaccaatgggggcaccatctatgccttctccctgcgtgtgcctcccgccgagcggagaatggatgagtctgtgcgggcagagcagggtgagtgctgggcagggagagcagagggtgctcgggctgcctgggctgggtccagggagtggctccagccctgccaccccctcaccagccccaacacccacctcctccccctagccaaggagatccagctgatgcaccgggcgccggtggtgggcatcctggtgctcgacggacacagcgtaccccttcctgagcccctcgaagtggcccatgatctgtcgaagagccctgacatgcagggaagccaccagctgctcgtcgtatcagaggagcagttcaaggtgccacacgggcagcggcgggtctccctgggactccccgggacatccaggaggctcggaccttgggcaaaaatgatggctgggactcagtcttgtttgcagttggtgtctgaggggctgcagaagtacaggaaataagtgaggggggagtctcgtgtgaggacactgaggcaggacagggggccaggcgcggtgactcatgcctgtaatgccagcactttgggaggccagatcacaagggcaggagttcgagatcagcctggccaatatggtgaaaccctgactactaaaaatacaaaaaaaaaatagcccggcatgggccaggcgcggtggctcatgcctgtaatcccagcactttgggaggccgaggcgggcagatcacaaggtcaggagatcgagaccatcctggctaacacggtgaaaccccgtctctacaaacaaatgcaaaaaaattagttaggcgtggtggcgggcacctgtagtcccagctactcaggaggctgaggcaggagaatggcgtgaacccaggaggcggagcttgcagtgagccgagattgtgccactgccctccagcctgggcgacagagcgagattccgtctcaaaaaaaaaaaaaaaaaaaaccagcatggtggtggacgcctgtaatcccagctctactcgggaggctgaggcagaagaattgcctgaggcggaggttgcagtgagccgagatcacaccactgtactccagcctgggcgacagagcaagactccatctcggaggaaaaaaaaaaaaatccagacagggaagtcggtgacctcggcatcctcccaggccatgtctgtgcatctgagagccaagagtttgtcaggacaccgggaggcatgcggggaggggagggcccagcagcagcagcacagggcaggagaactggtttggccatgggcatgaacaaccaccccacgcccccaggtgttcacgctgcccaaggtgagtgccaagctgaagttgaagctgacgcgcctggagggctcaagagtgcggcgggtcagcgtggcccacttcggcagtcgtcgagccgaggactacggggagcaccacctggcagtccttaccaacctgggcgacatccaggtggtctcgctgcccctgctcaagccccaggtgcgctacagctgcatccgccgggaggacgtcagtggcatcgcctcctgcgtcttcaccaaatatggccaaggtgtttgagccgggctgggtgggtgtcggggccccgggcactgcacggacgggaagggtggccaggggtgttgtggccacggccagactggatgggccttaagcggagaactgcgagggagcactagcccctactcccccaggtggggaggcagccttggcagccgccaggccaggccgctagcattgcccccactccccaggcttctacctgatctcaccctcggagtttgagcgcttctctctctccaccaagtggctggtggagccccggtgtctggtggattcagcagaaaccaagaaccaccgccctggtaacggtgcgggccccaagaaggccccgagccgagccaggtgagtgaaagggccagaggcctctcccgcccctcccgcccctccctgccctctctgagataccctgaggctcccactgctgcctggctggaggcacctccccacgagctcagcccaccctcccaggctccggctctccttgcctctttgcgtgccccttgcccctgtgcaagctggcagtccagggcaggactcagtttacctcccaggctctcctgctcaggacaggctgcgccattgacttgttcttcatgggaccagggctctcagagccgggcagggagcccgggggccctggtcctcactgtctcttcccccacaggaactcagggactcagagtgatggcgagggtaagacaggcctcctgggctcatgcacacctgggccacacccggcccagacctggggctggacgggagggaagggtcccgagtgagcaggtagtgtttgggctgggaatagagacggcattccttccagccctgggccctgggcttccacatcctgacctcagtaaggagagagagagccaggccgaggagggcccaggcgggggcgccctgacccggcctctaccttccagagaagcagcccggcctggtgatggagcgcgctctgctcagtgatgagagtgagttgggtgggagagggtggggctggcaggaggggtggggaaggggggtcagggtcaagggaggctgggcaggccactgccctgaggcggggtacagatccatgggcacccacggagaaagggggtggaagggctgtggctagccgccccaagggcctcagtgggcctctgttcccacccggcctgcaggagtcctgaaggaaatccagagcacactggagggagaccgcgggtgaggcaccgcccaggccagctggggtgggcccgaggctctgccagagggctcaggggagcgctgagagtggaggtccctgaggccatgactcccctgtctttgcctgtgcaggagcggcaactggtgttcacatcgagcggccgtggggtgcagcctcagcaatggcggaggtggggtctctgggcttgagtgcaactgccaaccgtgctgggaagggctgggaggaagagccccggccccactcccctgggtcccacggggctgacacgtgccctgatgaccaggaaagcaccatgtctgggctcagcgtgggcggctggggcaccccgtcctgcccagggtgatcttgagctgtccctctgtgtccttcagcagagtgagtggctgagcgtccaggctgcgcgatgagcacacactactactgatggcctttcgggggtccctgccccagccggagaggccggtgcacagggcccgccaggggctgggggcatcccggcttccacaatgcagctgctctgggcctcgggagaggagagaccccagtcccctgggctgcccttcccgggcctcgtctgtctgggtcctttggtcaatgttgcacagtttttattgctcccatccctttttgtagtgggctgggttttaagttataaatgttaactgcctctgggtgaaaaagtttttaataaacacctattacctcttgactggtc

SEQ ID NO: 705 - DNA, 6248 bp, Homo sapiens
ctgcccacaggcacgaggacggcacggtgcggttctgggatgcctcgggtgtctgcctgcggctgctctacaaactcagcactgtgcgcgtgttcctcaccgacacggaccccaacgagaacttcagtgcccagggcgaggacgagtggcccccactccgcaaggtgaggccaggagcctgggacccaggaagggcagaggccagctgggtccagtccccgtggctgctcacagggcccctccccttctccaggtgggctcctttgacccctacagtgatgacccccggctgggcatccagaagatcttcctctgcaagtacagcggctacctggctgtggcaggcacggcagggcaggtagcaggctgggctggggagggggagctggggaggagtggtcgatgactggggacagcagggacaggagccaaccacctgcctaacgcacattctgtgtcctttgcttttccggtggatggaggtggcttgatccccttggcgggaggtccctgggatggttgtttcttctccagaaatcggaattaagggctgggccgggcacggtggctcatgcctgtaatcccagcactttgggagaccaaggcaggcggatcacctgaggtcaggagttcgagaccagcctggccaacatggtgaaaccccatctctactaaaaatataaaaattagccaggcatttgtggctcgtgcctgtaatcccagctactggaaggccgagacaagagaatcacttgaacctgggaggcagaggttgcagtgagccgagattgtgccactgcgctccagcctgggcaacagagcaagacttgtctcaaaaaaaaaaaaaaaaaatgcaggagagctggggttggacagaggcctttgtccttccttgagccttgggcccagctcctttgctgtccccactagtagcatcctgcggccctgccgtccctttgctgagggcttgctgagccacctgccaccctgcgcaggtgctggtactggaactgaatgacgaggcagcggagcaggctgtggagcaggtggaggccgacctgctgcaggaccaagagggctaccgctggaaggggcacgagcgcctggcagcccgctcagggcccgtgcgctttgagcctggctttcagcccttcgtgttggtgcagtgtcagcccccggctgtggtcacctccttggccctgcactctgagtggcggctcgtggccttcggcaccagccatggctttggcctctttgaccaccagcagcggcggcaggtctttgttaagtgagcaggggcggctgggtcccggggctgggagtggggcccgcgaggactcccaggacctagcagcactgacagcctgccatccccccaaggtgcacactgcaccccagtgaccagctggccttggagggcccactctcccgcgtcaagtccctcaagaagtccttgcgtcagtcattccgccggatgcgtcggagccgggtgtccagccggaagcggcacccggctggccccccaggagaggtgaggcctgaggtgaggctgcggccggccacgcacccaggttcggctcagagcagccagcaggggggccacacggcccctgctccccaggcttgctaggctacaaacaagattcagggtccaggtcgcattgtgtgacctcagacaggtcacgctgcttctctctgcctcagcttcctgagcagaaaggcagtaactgtaatgcttatcctagaagtaatccccagtaaacgttagtgatttcctttttctctctacaacatgctgggggcccaggcaggctcccccaagggcacctccctcttggacaagggtccctctagacgcaggcctggcaggtggctggcatggctgtggcctgccttccgatgcaaggatcagcactgagcgaagcactgttcctggggaggggagtccagagctgacccttaggctggcccaccccttgcaggcacaggaggggagtgccaaggctgagcggccaggcctccagaacatggagctggcgcctgtgcagcgcaagatcgaggctcgctcggcagaggactccttcacaggcttcgtccggaccctgtactttgctgacacctacctgaaggacagtgagtggccagcctggggttgggggtcagggggtagtgggcagcagacaccccctgacctgggggcatgccgggggctgctgcctgcctggctggtaggagctaagaggtttccccttgtgagcaggggcagactgcagcccctgcctgcttactcccctcccctgcctcagcctctgagtcagcttcccttggctttatatccaggccgtagcaccctttagaagcatggcctcagacccatcacttagcctttcagggcctcagcttgcttctctgtaaatgaggaagtgacagcttcctcctagagcagctgtgacgatcggggacagcagagcctgctggtctccagatgacgtgtctctccctggctggttctcccctgctgtatcacagcaagggctgagctgacctgggattggggtcttctatgttggggcctgtgtggttgtcagagagccttccagcctctcccaggagggaaaacctgggagtaaaccctggttgcccagctccacccgactcccacgctaagggtcagacacccaaacatggcttctcggcaggctcccggcactgcccctcgctgtgggctggcaccaatgggggcaccatctatgccttctccctgcgtgtgcctcccgccgagcggagaatggatgagcctgtgcgggcagagcagggtgagtgctgggcagggagagcagagggtgctcgggctgcctgggctgggtccagggagtggctccagccctgccaccccctcaccagccccaacacccacctcctccccctagccaaggagatccagctgatgcaccgggcgccggtggtgggcatcctggtgctcgacggacacagcgtaccccttcccgagcccctcgaagtggcccatgatctgtcgaagagccctgacatgcagggaagccaccagctgctcgtcgtatcagaggagcagttcaaggtgccacacgggcagcggcgggtctccctgggactccccgggacatccaggaggctcggaccttgggcaaaaatgatggctgggactcagtcttgtttgcagttggtgtctgaggggctgcagaagtacaggaaataagtgaggggggagtctcgtgtgaggacactgaggcaggacagggggccaggcgcggtgactcatgcctgtaatgccagcactttgggaggccagatcacaagggcaggagttcgagatcagcctggccaatatggtgaaaccctgactactaaaaatacaaaaaaaaatagcccggcatgggccaggcgcggtggctcatgcctgtaatcccagcactttgggaggccgaggcgggcagatcacaaggtcaggagatcgagaccatcctggctaacacggtgaaaccccgtctctacaaacaaatgcaaaaaaattagttaggcgtggtggcgggcacctgtagtcccagctactcaggaggctgaggcaggagaatggcgtgaacccaggaggcggagcttgcagtgagccgagattgtgccactgccctccagcctgggcgacagagcgagattccgtctcaaaaaaaaaaaaaaaaaccagcatggtggtggacgcctgtaatcccagctctactcgggaggctgaggcagaagaattgcctgaggcggaggttgcagtgagccgagatcacaccactgtactccagcctgggcgacagagcaagactccatctcggaggaaaaaaaaaaaaatccagatagggaagtcggtgacctcggcatcctcccaggccatgtctgtgcatctgagagccaagggtttgtcaggacaccgggaggcatgtggggaggggagggcccagcagcagcagcacagggcaggagaactggtttggccatgggcatgaacaaccaccccacgcccccaggtgttcacgctgcccaaggtgagtgccaagctgaagttgaagctgacggccctggagggctcaagagtgcggcgggtcagcgtggcccacttcggcagtcgtcgagccgaggactacggggagcaccacctggcagtccttaccaacctgggcgacatccaggtggtctcgctgcccctgctcaagccccaggtgcgctacagctgcatccgccgggaggacgtcagtggcatcgcctcctgcgtcttcaccaaatatggccaaggtgtttgagccgggctgggtgggtgtcggggccccgggcactgcacggacgggaagggtggccaggggtgttgtggccacggccagactggatgggccttaagcggagaactgcgagggagcactagcccctactcccccaggtggggaggcagccttggcagccgccaggccaggccgctagcattgcccccactccccaggcttctacctgatctcaccctcggagtttgagcgcttctctctctccaccaagtggctggtggagccccggtgtctggtggattcagcagaaaccaagaaccaccgccctggtaacggtgcgggccccaagaaggccccgagccgagccaggtgagtgaaagggccagaggcctctcccgcccctcccgcccctccctgccctctctgagataccgaggctcccactgctgcctggctggaggcacctccccacgagctcagcccaccctcccaggctccggctctccttgcctctttgcgtgccccttgcccctgtgcaagctggcagtccagggcaggactcagtttacctcccaggctctccggctcaggacaggctgcgccattgacttgttcttcatgggaccagggctctcagagccgggcagggagcccgggggccctggtcctcactgtctcttcccccacaggaactcagggactcagagtgatggcgagggtaagacaggcctcctgggctcatgcacacctgggccacacccggcccagacctggggctggacgggagggaagggtcccgagtgagcaggtagtgtttgggctgggaatagagacggcattccttccagccctgggccctgggcttccacatcctgacctcagtaaggagagagagagccaggccgaggagggcccaggcggggcgccctgacccggcctctaccttccagagaagcagcccggcctggtgatggagcgcgctctgctcagtgatgagagtgagttgggtgggagagggtggggctggcaggaggggtggggaaggggggtcagggtcaagggaggctgggcaggccactgccctgaggcggggtacagatccatgggcacccacggagaaagggggtggaagggctgtggctagccgccccaagggcctcagtgggcctctgttcccacccggcctgcaggagtcctgaaggaaatccagagcacactggagggagaccgcgggtgaggcaccgcccaggccagctggggtgggcccgaggctctgccagagggctcaggggagcgctgagagtggaggtccctgaggccatgactcccctgtctttgcctgtgcaggagcggcaactggcgttcacatcgagccgccgtggggtgcagcctcagcaatggcggaggtgggggctctgggcttgagtgcagctgccaaccgtgctgggaagggctgggaggaagagccccggccccactcccctgggtcccacggggctgacacgtgccctgatgaccaggaaagcaccatgtctgggctcagcgtgggcggctggggcaccccgtcctgcccagggtgatcttgagctgtccctctgtgtccttcagcagagtgagtggctgagcgtccaggctgcgcgatgagcacacactactactgatggcctttcgggggtccctgccccaaccggagaggccggtgcacagggccccgccaggggctgggggcatcccggcttccacaatgcagctgctctgggcctcgggagaggagagaccccagtcccctgggctgcccttcccgggcctcgtctgtctgggtcctttggtcaatgttgcacagtttttattgctcccatccctttttgtagtgggctgggttttaagttataaatgttaactgcctctgggtgaaaaagtttttaataaacacctattacctcttgactggtc

SEQ ID NO: 706 - DNA, 727 bp, Homo sapiens
caggaggaagagtcctgtggcttctcagtccctgtggaggctaacgcaaagctctgtagaacaagccttagagtgcatgctctatggtctaatgagaaacttgtgtttgtgcttgcacacgtttcaatgttccctacaggatattttacaaaggtatgaaaataatggccaaccagaagctagtatcagtttggggcctaaatgcagcaggtgttcctgataagcagataagcagagctcttcctgcagtagcccaggtctcaccaaatgacaaatggctaatcaagacactcctgcaagcccttgatggtgagagctgcagagctgtttcttcagctgccatcaaggcaggacctcaggacctgactgtctacagtcagggaatagtgaacaatatgggatatgggtataggtaggtggtagacaaggatcgtgccccatggctgatgggccgggtgtctcaggcaggccccctgtgcacagaaagagcctaagtgcagagaagccaggcatctttcccctgtcaactgtggaaggggaatgtgatggccacagacaccctcatggcacagacatggccagcctctgacgttcctctgcatcagagtagttctgtcctcgaagccccagtcagcagagctggatgaccagatcgcaagaagcaaaccagaaagtgtgatggcagagatgtcagatcccgtttaataaacacttcagtaaacccaag

SEQ ID NO: 707 - DNA, 837 bp, Homo sapiens
tgagcgcttgctccagcctggaggacgctcagtgaggggtctacctagctcaatggccctccctggagtttcagggtcttctctggtcagcttttcaaggggtaaccagacacccccacactggctgggcccctgaggccatcaggaggtgtgactggccagcatttctggagaggcctcgagggaggcacaaacaaggctcacgccacctcaagccagcacaagctccttcctcctggccacaggtggggaaacccttatgcttccccaacaagaccatcactgccactgcgcacgaggctgcaggtgccattgactcagcccagaagggacagaggatgtctgcccagcaaaagcctctgggcttttcttactcccaacccagggcacaacactcagtgaggaacctatggtccacccatctctgcaggcccagggaagtgtcagtaacttaagcatctctaaggcagagaaggtggctgtgggtcttgaccaaccaagactgctcagggtcgggaggggaggctgcaggcctctggtgggagcagccgggccgtgggccacattctctgcatgctctagggctggggctgagctgctcaggaaaacaatgccgctctgtgctcactgtgggaaagccaggccagatgagcaaagctcattccagaaacatggctggggacttccagcctccttaccacatggcctttccaagattccaggttgatgatgcaaactgaacgcagtgaatgccagggcccagaaggcaatgtctgctgtgggcaggaccacagaggctgcccaggggtggcacagcacagagaagtgtcagtgccg

SEQ ID NO: 708 - DNA, 18301 bp, Homo sapiens
tgaatgaatgcccaataagcaataacttttattattactacagagttccaggtgcaaagctgaaaaggcataaatgaaagcacagcagatattgatgtagaagaaagctttttaatgcaacagcttaaacacacagttcaacaaaatcagtcaattcaaattaacttcaacatattacaaagaactatgaagcccggagaaggccactgttggaacaaaaaaccaagtccctgcccagaaagcatggacactgaccaaggaggcctcttgccccctcccacctctaggaggagcagccacaatcactgggctctttaaacagcttaggtgcctctctgcagaaggcagcagcacagagtcaaggacaaccattcaagggtcagggctctgccttcccaccaaaggagggcccgaacagaaggcactggggctcagacataggagactgtgcaaggacaggacagggcagggacagcagctgtacacctggagagactgcagccctggagaaccagctcaacaggctgctttggatcagggccttaggtttatccccctccttccaccccggcccaggagctcaggttgttcagatgaactgcagtgagttggggtctggggaagctacaagggcagcactcagtctgcagcccacttgggcaggacaaagccaaatgctttgctgatgaggatctgttggtgtgatcagctagctgggctgggggaatagggacagagcttcagcttcacgcttagctctagtggggacctttctggtgcaacaaccatgtctgtgtttgactacactgagtttaatttgaacaagcaaagcctcttacagggtgggaggccatcaagggattgaggagggggcttcagagctcacttggggcatgctgggtttcaggagcgggcacagagcaggtggcccatggcttctctgggtaaggtcaggcaggggttccagttgccctgttgggtttttagtgtaggttctgcttcacttcctgccgcaacttctgtgcaggaccattcctaggctcaatctgtaggaggttgctgatgtctgcaaagctggatttatagtcctaatagaagaaaagacaggagtgtgggggaaggttcccggactggggtggggatagctgctgaggcagcaaagtgttttcaaaccccagcccacaggcctgctctgagttatcctgggcccaggatgagaaggaaaagctgcagatattgtctcagcttggctacaccctgtaaatggtgacactggcataaatctctgtagctatgttgggaccttttggccaggatttttttttaccttgagtgctttgtgggcttgagcccgtctgtagaatgccttcacgttctttccatccagcttgagggcttctgtgcagtccttcactgcttctgtgtactgcttcaggaccaaatagcagagtgctctgaagggaaagaccatttcagaggtttcagtcacgtcttatgggccacccacatgccacgcagtagtttgagaagtgatctccaatttgctgaacacctactctgtgctggttactttatgtcttcttaaatcctcacaacaatcctagcccttttcatggatgaaacatgctggctcagaagggtaaaggaacttgggccaggtaccgccagtattaaggggcagacccaggattcaaataggcgggcgttcgttcatgggactccagatcctgatctcatctagttctatcatgctgtactgcgctctcctatactgagctctttcaagcaaagaaaaggtttcctgaaacttttcccttgacagattaaaaaattatctactttaagggggaaaaaaaaacccaacaactactgaactctaatgatataatgctgacatggggtgaaatgtaaagacgtttgcaatttacttttaagtgcatcaaacacaataatacagaccaacagatggctaaatagtgataaggcaatgtaataatactaattgtagaatttagatggtaggtctatgggtgttcaatgtacaaatctttcaactttcctatattttgaacattttcataataaaatgttggaaaaaagttatgtgcatccatacaatatattctgcatctgtgggttcaaaaaagtgcatgtgtgtatatatcttcctcattcagatctagtccttctctccaaagacagtcactaaaaacaaaacagtcagatgtctgggcgctcattacataagttcatctgttccacctcactgttttcagtgggtgcagggtattcactaagttggatgtagcataatttattttaccaatttcctatcaagaggtatttttcattgtttccagtttgtaaataagtgatgccatgatgaacatccttgtgcaagggactgctgtatccaaagatacatgcattttaaaacctgactggccaggtgcagtggctcatgcttataatcccagcactttgggaggccaaggtgggaaggtcacttgagcccaggagtttgagaccagcctgggcaacatagggagaccccatctcttaaacaaaacaaaacaaaaaaagaaataaaatctgattgttactgccaaaatgctttccaaaaaagctgaatagttattgacagagcctattttcctacaactgtaccaactttgggtcttaaattttcatgtatgccaatatggaataaaacactatctcactgccttagctgcttagttgtgggtaaagctgaacatctttaataagggtttttaatcttttgaaatcaaacttctctaacttttcctttaacgacttctgtaacatttttttcccttcacataagaataccttccccactgcaagatagttaatccatgtgttcttctagaacttaatggtttcgctttttacattccaaactgtgatccactcagaacttactttaaaataagaagcaaggtaggattcaagtttaactctaacctggccaacccaacacctcttattaaataatctctctttgccccagactttattatacaccagattctctcatgtcgttgttctcatttttttctgacttatcatgaatttaaagaagaaaattctactagtcctttgtgattgcatggaattcataaattaacggagagaaaaatcttcttgtaacaacttaaaagacaggcacaaattctttggcaatcctccactgagaggcggaggtgtatctgctctctctctttgaattcgggcaggctctgtgactgctctgaccaacagaggacagaggaagggacacgatgtgacttccaaggttaggtcataataggccttgcagcttccaccttggtctctggaaacactcgctcttggagccttgaactgacagggaagaagccaactactctgaggccaccacgctctcaggaagctcacagcagcacacatgaaaaggctgctaagaaagtggaaagaggtgccagcttgctctagcagttccatcacccagccatttgagtcaggcagcccagctgccagacattcgaggaagaaggctttagaggattccagccccagctaccatcttgctgaccctgcatgagagaccccaaatgagaactgcccttccctaattcctgactccacaaattacaagcaaaataaaatggttgttgtaaatcaccaagttttagaatagtagcccgttttaaactttgaacacagaagaattcctttttttttttggagacagggtctcactctgtcacccaggctggagtgcagtggcatgataacagctcactgcaacctccgcctcctgggttcaagcgattctcctacttcagcctcccgagtagctgggattacaggtgcatgccaccatgcccagctaacttttgtattttttggtagagatggggtttcaccatgttggccagcctggtctcaaactcctaacctcaagcaatctgcccacctcagcctcccaaagtgctgggattacaggcatgagccacctctaaacatagaggaattctaaggaaattaaagtttcctcccaatgggcttggcaatttaaagaaatagccaagtgtctgggaagcagaggaaccaccgtgtatcgtgacttcagaatagaaatgtgattaatagggtcatgtgagacttctaaagactatatttaagatgaacaaaatgcataacttcaggcaataaaataaacccccttgacttttggtaaatgaagtaactgtatccagtcagaagggttttaattacaaaggggttgggaaataacacaagtgagtgaaagggaaataagctttggagtcacaaagatctggcttaaatctcagccaccatgtactagttgtttaactttgtggtcactaattcatctttctgagcctgattaggtaacacaggacaatgatctaagctgaagaactgttgtgagtacaagtgagattcttatgacagctgtttcagggctggcaagttgtaggtgctatgcactcagatgtcacctgcacaaagggagccaaagtaagccaaagcctgggcattgtgtcattcagatgggcgtacatgaggtggagcattagactatgtccaagacgttccaggacatgataaaatgttagccacaatggctgaaagttgttttgtcattagtcctctagattaaattataaatccaatgcaatcacaaccaaaagctgtccaacaagacattttttggaatttgccaaaatgatccgaagctttagctagaagaacaaacatgggaaaatactaggaatgctctgattaagaagaatgaagaaaagaccagccctataagatattataaagcaaaagcaattaaaacagtgtggcacagacacctgcatgaagaacagtatctaaacaagacaaaacacagctccaaatatggtaatgatccagaaaaatgagttaatggaggtgtccagcagcataaggtaagcaatgtgaaagagggtccagagatagaggagttagaagatgccacacaaatatggaacaaataggctgcaggcttctttttcaaattagcctggcaaattgtggcccctctggtccaatcagcaataaaaccacataaaaccacaggtgcaaaattccaaaatataagctttaaaactacaagttctctttccaactcattgggcagcaaaacctgatctgaactgacatgaagctatttagtttctctattccaccccatgtgaacatggaattttcaagtttcactggcagaaatactaataattaacttctgcaagctgccccagacactgctggggtgttacataattcagaccatattacctcactaaaatggaaaacacttcttttttttttgtgacagagtctcgctctgtcacccaggctggagtgcagtggcacaatcttggctcactgtaacctctgcctcctgggttcaagtgattctcctgcctcagcctcctgagtagctgagatcacaggcatgtgccacagcgcccagctgattttttgtatttttagtagagatggggttttgccgtgttggccaggctggtctcaaactcctgacctcaagtgatcctcccggagcctcagcctcccaaagtgttgggattacaggcattgagccaccgtggctggaaaacacattttatctcaagagtttggaataaggaacaatgtgtctatattagatccaagatttttgaactagagagtgatatgtgtatgctggtagggaaggataaacagatttctaacattttataatgttttatactaagcatttggttttgatatggtctcttgctgaatgtttcaagcttctgagagtaaaagtaacaggaagatcttgttgaagtcagattccaattcttgtgccaacatttactggctggctgagtttaaagcaaaacccttccttctctgagcctcaattttctaaacactaaaacagaaagaccacctatacgagcattgttggagaacaatcactcctacacagtgaagggaccgcaccctggctcccaggttctcagtcagtggtcactgacggcagctcctggtgcaggactttctacaggcccacaagtctaacctttcaggctagactgtacccatccttcctgctctcatgccaggcaatggttacttcacattttggcttctgggccagtactctcagacagaaatggtgccagaatttctaacaggagggtcttggagaagggtagggagcagcgtagcgtggtggggtggacaggctaagagacttgtgttagggttgtgtttgcagagcaggcacactgcttttagttacattgcatgcttatgaaaattctggggacaggggccaacaaagcccaggctaccatttggcatccctcagtttctacccttttgagagaatgaatgccactggtcatggctagctcacaacgtggatgcatgttttcagccataacatacttgactaaatgctagggatgaagggcccattgcagtccaagagaagactatggaacaaatgtcctgaaatgccccaggccagcagctgtataggagatacctgttgctgtacgtggcagattccaggttactacacaagaggctttcactgtacttctcaatagctttcttatggtttcccttctttacaagctcattgccttcttccttcagaactctggctttctccacatccccagcagaaggcactagatacaaattcagaagaggaaaaaaaccatggagcagcacccaactgagatcagtgaggtctcttcagcatcgtcccttccaaactgactacaatcctctctcccagagatttcctcccctgctgtaaatcatccttcctgattaatgacttcccccaattaatagcttctgggcaattcaacagtttttcatcaagaagttggggaatcctgatataaaaacatttttgcatgcacataaaaatatataaatgataaaaagcaacccaggttctagccttggcactgcctcttggtagctggaagatcttgtgtgacctacctaacttttggacctcaatttcctcaccaataaaatagggcaatactaattccacagatggctattttcagggtcaaatctgagagtatgtaagaaagtacggaacacactataaacttaaagcaggacaataagtaaataaatactaataaacaaatatctggtaaagaaaaggtatagcttctgggctatgagaaaaggggagaagagcctgctattcctcatttctggtttgggctgagcctgtgagtatcctccctcatctaacacatgcagctctgctccagccttcaaggagaggaagcagagggaacatggtgaaatccaagctgctcaacttggtgttcaggcccttcactgcttggccccaattaattattccagcctcagctccatatcatctgcttttcaaaaatttttaaaactatctttataaaatactaaatatttatgaccagggtaagattataggtttacaccctgaattcattgcctggtttaagaaaaagaacataactaggacctttgaagtcctgggggaccttcctcaattcaatccactgctggaggaaactattatccccaattctgtgcttcttccccacctttttaaacagtataactatatacaacagtacccacagatcatttgctgtttactttgtttttgaacttcatacagaagaataagtctgtgtattcttttatgacttggtttttctttttccccttaatgttatatttctgagattcatctgtgttgatgcacagacctgcagctccttcattttcattgctgcaataccaaagctgaattgtccattctcccatttatggagatctgggttatctccagttgttttttgctattacagtcttctacgaacatttgtgggtacatctccctgtgcacatgcacacaggtttctcttgaagtagggcttcagcttcactggcaccctgcaacacaccactctgcagtcatccttattcctactgttccccccatgcactttcattctccaactctctccactgtctctgccaaggattctccttccttcccacctgatgaccttcttcaaggtccagctcaaggctccacctccattgccaccccttctgagtctttccccgactccctcatgcacttaagtcagtttctatcctgaagtcctcaaacactaagactctaaagcacatgttcctcctccttgtgttttaagacactgtttacatgtctcagtccctcaactgagggagagttccctgagggccaagactgtcctctgtgtcacactgcttagcatacacatggcttggaacacatggctcagtgaccctgaaagaatgaaatcaatggtaggtgcactgatttaaagaatgaaatcaatggtaggtgcactgattgaaagaatgaaatcaatggcactgatgccatcaggttcattagcaccgcacattttcatcctagagaagagtggggaacacttaccaggctcccacaaaccagagtgaatgctacccatgaccagagaggcattctcctgtagaaggtgagtaactcttgtcctcccctaacacctataggtcacttacacatggcagggctccatctctgatcccttctgcacctctagcctgaatccctagcttgctgggctgggaccattcccctggagcattaaaagagcttcctagtgcctgacaaatggcctcttcatttcatacagttgaggtgaggaatctcctgtttttggctgcttggatctcctttctcttcttcatgcttctccagggattcacacagtgtacatgctcctgggaagcatcaccctctagttctggaggtggggcaggtgcctcagggtgacctaatcacaaaatctcatccgccggttatggtgtgtacttcagggaatggcctgtgaccatgaagaccagaatagattgagaaaatgattgagaaaatatgtgagctagagttttttgggggaaaaaaatcctatcttttcctagtgagctatcagagaaagactttctttctctgggtcatgaggcatggggtatggatgtgaggccgggaactgctatagctattttgctactaggagggaagcttgccaaagacaaagctgacgcacaacagaaaataaagctgtgataagtacagaaaaatggagttagtctgttaatatactgagctgctggagcaaaccttgcctgaattctctcggatttttcagttttatgagccaataaattccctatactatgtttaccatgttgagctttctgtttttgcaaccaaaaacatcctaagtactacatcccaagtgctaccagaggaaagagaagggaactcacactgcatgcctatgtgccaggctgggagttttacatgtcttatgtcattcagtcctcatggttgtgaggaagactttatcatcaccctcactatacagctgagaaaacagtctctaagaggtgaagacttgtattttgttttatactttgttcctaagattatttttataactcagctaaacaatgccaatttttgcaggactactctaaagaaaatggatagtgggagattgcaagactctgggcagggagtcacagctcacctctgttctttgtagctgtggtttctttggatttgcttttagccatctctttgtggttctccgaaggcaaggaattccacctcttctgagctgaaacaggcaccaaggggattgagggcagcttcaggcgccactcaggcccaagcgagtccatgagagctctggtcattctggaaaagaaggcaggattgcagggaggtttccagctgggtcaagaagatatttctcctttcacacacccatgggaggtaggccttttcagaagagccagagctgccaccctccccctggtcggaaccacctctttagctcctccaacacgtgcaatacaggaacccataaacaccatctcagatcagtccccatgacattccttgagcttggtcaaactatgttacctttaaagtggtgatctgttgcttgttaaggatacttaaaccatgatccaaaaagactatagtttctccaagaaagaatcatacattttgtttcatattttatcaatgaatcaagtacacaaccatgcaagcacctgacatttgtttaatgctcaggctttttaaaaaatgcaaagcttatgtcattctcaaatcttacaactcctcaggggttcccaattccctaggctaatgtggcatgtgagatctggtccccaccccttcctgtcccccttcactgtgagccacattctcttctgatccttctgttcaagactttgcacatgctttttcctctacccagaacaaccattttcattttggaaaaagattgccaccttccaggcccggctaactccaacttattctttagatttcagcttaaaatgccacccagagaccaagttcattctgtcaactgatctccagcacctggtatgtcacctagcaaccaccaaggcccaatcagttatgtgttgaatgagtgaataatgctaactgtatactttttctgctcctacaaccatgtttcctatattacaagaataaaaaccacagactgtatcactacaaattccaagatgtctctggctaggctgttttcctggcggccaagctatttcaaacctctgctctcctcaaacctgttccctggcccttccccttttttagagcaaacttcctcataccccaaatacaaacctacctgcctgggtgcccaatccttcctatttctctcctgtcacaacagaagagacaatgggaccaatccacccacctaagctctggatcccatctcctcttgcctctttcagggaccacacccaggcagcacctccctctcccacatcttcatccttcctctctactaactccaaccgtcagcatttaagtccctttaactctttcctcacctaataaaaccatactggacaccccttgccatcacaggtatactccccagcttctcttcaagcctgactttctgaaagcattgccctctggctcctgatcccactgaccagcttccatcagagccaccggtgacttcattgccaaacctttaatgtaagctccttggaacacctgacactaatgatgtctccatctttcttgaaatactccttcccttgggacatcaatgccctgtttcctcccacctctctagctgctgttcctctgtaagtccctcaaatgctggagtttctcaaagctccatcctcttcacactagctgtgatgttctttttctttctcacagccctaatccacctctgcgctgatgaccctcaaatccttatgtctggcctgtattttcttcctttgttccatgtaaatacccaaccgtcctacttagatctctagtcttatgtcccacagtcacctccgactgaatgtcaataatctgagtgtcttcttctattcctcccttctcgataccccgcaaccactaaagcttgttgatatacttcctacatgtcccctgactggtcccattgttttctctccaccctctcccctggattgctgcatgactcctttctattctgttgcccttcatatcatccctcaacatggcagcaaagagcttttctctaaaatacaaatctgctcatgttgctccactgctaaagaccttttcataaaggctgacttgctcaggattaagtccaagccctgaaccctgggtcttgtgtgacttggcctcaccaacctgtcccaagctgagctcctgcctgcagcaccatgtgaaaccgacttcttacaattcctgtgatctgtcacacttgctcacctttgcacacgctgctctgtcttctggctaaccccctaccccatatctctcattcttagctcacctcctctgaaaagctctctctggcctccccctctccctctcagctagctaggtggctcctttctggcctcagagccccctgtgctgcctcctaccatggcgcttatcatgttgtattgtgcttgcctattactgactggtgtcttccttgagaccgggacctctatgacggcaggaagaggtatgtctcagtcatcagcccaggtcctagagcaaagtctgtcacataattggtagattttgtggaatcagataagttaaaaaggaggcaaagagaaaacaaagaatgctggcagacaagtcaagccagaaataaagcactaaatacataccatgaagtccctgttaagggtttgctattagtgcagtgtttggctttctagccgcacacgcagaggggaaacatgatcagttatacaaatgacaatatccatgagataaaagccaataactgctcagagaccagaaaggaattgcacctggggaacctcttggattggtcacagtgcaatatactgaaccatgtccacaaaccatatccttttaggcttgtcatagctgcttgggcttgtgtcttattcttctaattagcgttagcgctttgaaggtaagtggggtctgtatctctttctcattttggtatcccccactgaaccgggcacaacaccttaaacagtgtacaataaatattactgtgtacatagatactgtgaggcacatgtaggcaaatatcaatcaatcaatcttagtaattgactccctgaaaacctgctaaataaaaaagcagattttcctttctcagcttcccctacatgcccatcgggagttttttaagtgtagccaaagggatcccctcagaagacagacaaggcaatggcccgcagccaatcaagaaggacagggagttgccgtggagaccacctgctgggaatggagctcacctgttgatgccttctacggctgacgtcacattatcatcaatctgcagcacagtcttatagtcaacataggccatagggtacttctccagagcctcataagcagatgctcgccgcagcaggggcttaatgctgaagggaaccaaggccagtgctctagaataggaggcaaaaatgtcaactggctggctgctgagccaccagggtttccctacagtttcttccaggcagggttatctggagcactcagcgtacaggaagtaatttctggccgagagacatggctaaaaacgccaaacctcagaacagggatttttcaacgtagactgaagtgaggaggagaaagaaggcagagaaacatgaattttgttaaatgtgtgtgcacatgcatcaattttcatagtttcagttcccccaaaatcaagaacaaaagcctcatggctttcatgctactatgtttttttacagttgtggtctagtgggaataacaaacaagctttggagtcagatggggtggtgtctgaattccacctctgctgctaactatgtgacccaggtaaatcactttactgccccaaccctcagcaaccaagttctggcctgggacacatggtaaccgtaccccacagattggttgtgaacactcaaagagggaaatctggcacaaggcatggcacaaattaattcagcacaggctctgtgagtatgctcacacccctcctgctctcctggctatcaccagggcaggaatctaaagcaatgtcagaggacatcagatctgagaacacatttcaggtaaatgtgagagtttaatgatgataaaagaatattagactggcttgaagaaaaagagatatgaaacattgttcagtgtcctctaaaactggtcattcatgaataccatttttttcctttctccttctgagacaatctattaacctctattcctccttctttccttcgctcccttcccctcacatactcccatcccagaaaagcacctgggcaagccagttactggtctgccactccaccttattcccaggtttcaaattgcacaaagactttacggcctgcttctaactgcccatcccactcctttttcggcagcagagccaagactccaaagatgcaagtcacgggccataaggaccaaataaagactcccattctcagtgacctggtgaaactcagtgacactttcttaatatctgtcccagatgtaattgatgggatccttccaaagaagaaacaagccagattaacccagcctcctcttctgagaccctcaggcatcccaaaattacccttggccacttacgaagtgcaatctttgatgcagtctctgcagtttccatccttcaagtgacatgctgctcggttggagtagagaacactttcttcttctgggtctgaagaacctgcccagatagagtggggaagatgatcagtttggaaaatgggtgcctcagggcattaggatacatttcaaactcagagctctttgggccttgtgttaaggcagtagagataactataacctgttcaggcttgttggtctgctgggctggcgtgtttgtcattcttatgtgacagaaggacactgcgctttttgccattcaaagggaaccaagtatttcctcattcactcattccagcactgaacttgataacagacaaaagataaacaagaaatagctagcttctgcctcaaagaaatccatgctgtaactacttgggtttgggtggataaatggatggataggtgtgtattttattacaaaaagcatttaaatccaagaaagaaagaaaaaaaaaaaaagaaaagaaagggagggagggagggaacaagatgataaacgtatgataaatggattgaccaaaagttgtaggggcacaaaacacccatgaaagacatgagactagttttacctggtcaagccagggaggactttgtcagggaaatgataattgagctgggtgtgatgggagtacagagaacttaatcaggaaaaagtcttaagctaccccatggggagaattattagacattcttctaaggcagtccttaccctcaggaatcgcagaggctcaagtccttcactgtggccaccatgatctttatttacgtatttttttttgagacagagtcctgctctgttgcccagcctggagtgcagtggagcgatctccgctcactgcaactccacctcctgggttcaagcaattctcctgcctcagcctcagcctcctgagtagctgggattacaggcactcgccaccacgcctggtagagacagggtttcactatgttggccaagctggtcttgaactcctgacctcaggcaatccgcctgcctcggcctcccaaagtactgggattacagacgtgagccaccgtgcccaaccaacaatgatctttatttttaaagataattttcaaccacttcatacccactagtgtcggccattattttaaaaagaattgaaaacagggtctctttttgaaaattttgaaacatacagaagaccattatctcagaatccaccactagatttagcacgttatattagttcccaacttttttaatttttagagacagcgtctccctctgttgcccaggctgaagtgtagtagcacaatcatagctcactgcagcctcaaactcttgggctcaagtgatcttcccagctcagcctaccaagcagataggactacaggtgtgtacccccaagcccagttaatttttaaagtttttgtagagacagagtcccactgtgttgcccaggttggtcttgaatgcctagcctcaagtgatcctcccgctttggcctcccaaagtgttgggattataggcatgagctatggcacccaacccttaaaaatttttttgataagctaaaactccagccatccccatccttatccctgtgctccctccccagactcacagaggccagtacaatcctgaagttggtatgtaacattttcaagcatgttctacatttacatatatatgtatatatgtatatgtatatatgtatacatgtacatgtatatatatgtatatgtatatatatgtgtgtgtgtgtgtgtgtgttaacaggaaagataccattttatgtctattaaagcatttcctaagaggcatcatattgcctatccttctgcaacttacttttttcactcagtatcctgttgccatgttgatatttgatatctttcattcaataccaacaataacaagcgttttcccctcttgttttgccaggcccagagacggaaagtacaaagactagtaaaatacatccttgcccttaaggagctaagtacccaaaacctgtaatccatcttgagtcaccagagtacggttgctcagaaacagcagtggtgcggtggaaagggcatcaaccctgcgatccggacaagtcactccatccctctgatcatgcgtgcccacctaccacatgaggatatcacttcatagacttgctggaagggttcattgtgttagcctgttccctgagctctcttcgtgatcaagaagactgatcagataaatcaagagacttgcccaaaattacctaggaaatctgtagcagcagcagaaccaaactccggtccttgctaaatctagataccaggctagcttttctatggacccagaattaacccatacaaatgtacaagcttttccagaccagctggggtgagatgaatgaaaatggcagcaacatcaatacctcagcttcttcagcaacttcatcaagtaaggctgccatgaggaagtgggcctaaaggagagttttctagaacaaagaagggggcaaaggagtggcttgaaactgcaaaaagtgcagacaaaaaaaaaaaaaaaaagaatgaaatctggagaggatgtgaggagaggtctagcaaaatgattaaaaatttggacttagcatcaaagtcaaacagatccatattcaaatcgtggctcttccatgtcttcactatgtaaccccgagggagccaatttaactctcttggactcctcctttctaagcattttatccacagggccataataaagatcaaaggagatcgtgtctaaaatgtctagcacatggtaaatcactcaagagatgctagccaagaaaaggaaaaaaaggaaggcggcaaagggaaataggtactgaacggtgactcacagaaaccaggatccaaggctcctttcaaaagtcaaggctttaaccaatgagggtttctgattaagtcaccctggagaaggggctttgggcaaaggtctgcggtatgctgacgaaagctggacgctgggagaactggtaagaatatgctattcttctgtttcaaactctccagtagcttcccatccagcagctttcatgccaagcttccagtttggcatgaaatccgaactccttagcagagtttacaacacctccacaataaataagggtctgccttcctaactgacctcatgtcttcctattccctgccctggctcactatgctttgacccctgaaacacaccatgtttatatcgtcttggagggggggcctttctcattgcagttcacttcaggaccgaaaaccttgtgcgcttggcttctcatcatttagacatcacctcaaatatcacttctttacagatgttgcccttgatctcccactccagtcaactctatcacatcaccctatttgtcttcttcctaaccctgattatcccacaggtctcgtttacttactgactcgcttaagactcacgtcctccccaccgcccccacaagaatgcgctgtccttgagagaagggactttttgtgtcttgttacacaggcggtatataacagctactcaacaaatactaactgaaaaatgaattgctgcgggggaggagggtttagctttcttctcagggctcagaacgaggcctaaataacttaggatgggggccaacagggcagttaacaagcaggtggaaagaaagggccgaggaagtttctggtaggatgccggagtcggaaggggctggaagggtgggagggccgggcaggactgctggccgccgcgcgaggcccgggcggtggttgcgggagttggaggagcaggcccggaggtgagatgggggccggggtcgtaccttgcgcctgcagcacccgcagcgcgcggccgtagagcgcggaggcctcggcgtactggccgttgcggaaactctcattgccggcggcgcggagctcctccacagagtctgggaatttgggggccatcccgtggccaggccggcgagttgggagctccttccttcctcccccgtgtggtgcggcacaccttccgggcgcaagcgccggcggcgaatatct

SEQ ID NO: 709 - DNA, 383 bp, Homo sapiens
caaaaccatactggcctgccctgtcccccatcctgtgcccataaaaaccacaggccccaccagcagagcagcagagcagctgagaaagacagaagagaagaagtagctggacgttggagaaaagcagcttgacttcagagggacagcttgacagtgggaccttggagaagagtttgaccagggatggccaaactccaggggaagaccaccttcccactccatcccctttccagctcttcattccactgagatccacttccatcagcaataaaatcctctgggtttaccatcttcaattcatttgtgtgacctgattccccctggatgccagacagtgacccaggtacgggtgcaagagactgtcacactgaccctccactgag

SEQ ID NO: 710 - DNA, 370 bp, Homo sapiens
actcataggaccactctggtgaattgttgaatagattgtgtgttatctgccacacttcaagtactagcatgcattaaaatccctatccctttgccctccaatgtaaaatgatatgaattctgtggcttacacatagctattttttttttttttttttggcctgcatagataaggcaattccgtaaggctgtgttaccattctcctaaagggcctccctgtggggccacagtacatcttgcctaatttctttttaacaatatttatttctgtggtcaagaagaagataaggtaccttagaagtagtcactgttctatctcaatttggatatgcttgttgaagaactcttacaaccacttatttctgggaaa

SEQ ID NO: 711 - DNA, 593 bp, Homo sapiens
cacagcatgagggcgagaggtgagccgagggcaggggacgtggggtcatgatgtctcctaaaggaacttctcttattgcccagggcgggaggtttcacagcagccgtttcctgggtgtcctgctctcccagagtgctctgcagtattatccttttacctcaggccactgtgtagcaccatgtaaagggtcttatgcctttacattgacacgattggagcctttgaaacgtggttatgaagcaggcttgattttctgcatttttcagatgaaaaagcagagactggaggtttcctatcttggtcaagttcatgtgagctcgtaagtgaagaatccaggaactgaattcctgtccctgaccccaaattccttgctgggagggcttgagtggtgccctattccctacactatgaagtggagacagtgtgcagggccattctctgaaagccctttgtgcctctgggcctttgcatgtgcttgtctccgtctgcccgagggctggcttctgttcatgcatcaggagccagctgcagtgtcaccacctctgtgaaggcgccgtgattccctccagtgcttcatcctttgtgttttccca

SEQ ID NO: 712 - DNA, 593 bp, Homo sapiens; identical to SEQ ID NO: 711

SEQ ID NO: 713 - DNA, 220 bp, Homo sapiens
aaagtactgggattacaggcgtgagccttgttggcccagccctcttggagtcttaggaaggggcgcaggttgcctgggtttccctccttgcctcttcctgcccccagagagcaccatgaagcccaatgaaggtggatatggggcaggagctcgctggggctctggtgtgcaggaaggtttccctgtttgtcttcaaaactgattttgtaagtgctgagag

SEQ ID NO: 714 - DNA, 220 bp, Homo sapiens; identical to SEQ ID NO: 713

SEQ ID NO: 715 - DNA, 459 bp, Homo sapiens
agggaacattcccctttctacactctcttccctaaaaagattggttcaaaaatcccacagaactcttgagtgttagccatttgctttaaatcctaccatgtcataccttgtcctttaggattatgcatttgtgatagaggagggcatgggagaatgaaacacgtgtggccgtttctctattactcagacctcagggcaaacaagtacatcggaacttttctgaagggtgggctttgcttgggagaggtggagtgtgagggtgccagggcacttgttgggttggcgggcaccccaggaaaaaaatgtagcaaggacacaattgtgggcatgccccactttttttttgagatagggtctcgctgtcacccaggctggagtgcagtgctctcagtgtcacccaggctgtgcagtgtcacccaggctggagtgcagtgcatggctcactgcagcctccacctc

SEQ ID NO: 716 - DNA, 157 bp, Homo sapiens
tttcctcttttttttttaaattatactttaagttttagggtacatgtgtacaacgtgtaggtttgttacatatgtatacatgtgccatgttggtgtgctgcacccattaactcatcgtttacattaggtatatctcctaatgctatccctccccgct

SEQ ID NO: 717 - DNA, 200 bp, Homo sapiens
ccaggatggagtgcagtggcatgatctcggctcactgcaagctccgcctcccaggttcacaccattctcctgcctcagcctcccgagtagctgggactacaggcgcccacctccacgcccagctaatttttttgtatttttagtagagacgggatttcaccatgttagccaggatggtctcgatctcctgacctcatgat

SEQ ID NO: 718 - DNA, 2350 bp, Homo sapiens
tgcttgatttaaaaatttcagtcttgttaaatttatctcataggattctgacttcctcctctgttatcttgaatttcattgggcttgctcaaaacaggtattttgaattctctgaaaggtcaagtatctgtatcactctgggattgtcactggtgccttatttagtttatttggtgaggtcatgtttctcgggatggtctcgatgctttggatgtttgttgatgtccgagcattgaacggttagatatttgttgtggtcttcacagtcttggcttgtttgtacccatctttcttgagaaggctttctaggtattccaagtgtgttgtgtgttgtaatctaagtctttggttactgcagctgcatctgcattagggggcacctcaagccgagtaatgctgtgactcttggcagatgcgtggaagcactgtcttggtgatctggggtaagatccaagagaattccctgcattaccaggcagagactcttttccccttctcttgccttcctgcaaacaaatggagtctctctccatactgagctccctggatcctggggcaggggtgacacaagagcccatatggccaccaccactgggactgcactggatcagacctaaagccagggcaacactgggtcttgcctaaggcccacagtgaccactgcctggctattgctgatgttcacccaaggcccaggggctgttcagtcagcagttggtgaacccagccagacccatgtccttcccttcaaggcaataagcttttctccctgctggcccaaggtgggttcccttctggccctgggtgtgtctggaaatgtcatctgggagctagggcctggatgagtgcatcagggctctgcctggcaccctatcctactgtggctgagctggtgtacaagttgcaagacagtcttctttactcctcctcctcctctcctgtagcagaaagaaggaatctctcccaaagctgcgagctgtactgcttggggttgggggaggggtggcacaagcactcccttagccaccctggctggtgtctcactaatttgtgtgcaccccaagtccactggctccaagggcagcgcagcaccagggctttcccaggagttgcactctttgtggcctagactgtctttcaagtttatttaagtttatcaagtttatttaagtgctctggcactttagccctcagtgatggggctagtttgaactcaggttctgactgctaggatgggacagtttccctctggctggggctggtctaaatgttccctccatgggcactggctgaattctgccccatgttgctttctgctgtgacaaggcagcagtgagttacaatgcaaagtctcacaattactgtgctctccctcccctaagcacacagattctctctcggtgtcacgaggctgctgctgggggacgggggtggggtggtgtaggcaattcaagactgtctttcctaccatcttcagtgcctttctccttgatacgctgttaaaaccaggcactgtgattgcttacctgatatttgttttttatgaaggggctttctcgtgtggatagctgttcaatttggcattcctgttggggggtggacagtgattgctggagggttttatttggtcgtcttgctccacctcatttcctgacatagaatttttggttggagatacttttcaactggaattttgaatgggctacttcattgattgtttatgttcattgcagctgttaagatatctgatgcctgtttatcttaatttgggtttcaccaaaagctatgcttagtagatgacgagctgagaaaaggacttgggtgcaagtaattcatttgggaattgacctcggaaattaggggcaggtaagacataaggatgagaaaagtcaataaggaaggatattattgaaaaagttactcctgtgggcaactgcactcagtcctgctgggaccctctcagagcccatgaaacacaccttagaattgtcccatgcaggatcaaggaaactgggatgtctgtctcccaattactgccctttgttgcttgagggttttacttggagaattacctccctggcactccagcccatcccatactcaggctgaacatgcttctctggccagagaagagattcaggcagagaaactcaggaacttgaggtagaaagacctcaaaccatatgagaactgtccaccaaagctgccatagaactttggcttgggctaagaagttacaaaccttatgtgcataacattagtagcaacaaaaaaaagcactgacatctcagatcagaaacaaaggtagagacattctgcagagtagttgaacaccaaaaaaaaaaaaaaa

SEQ ID NO: 719 - DNA, 335 bp, Homo sapiens
gcccagcctgaagtccatcttaattctccttttcctcacgtcctaccatacctgtttgtcgagcttgctaatgttgtcacataaacatttcttgaatttgtcctttcacttccatctcctcctctcctgcctcagtttctcgtgggttgtcataatattagtagctttctcagcagtctgcttggccccttcctcttcccacctcaaggctgttcttcacactgaccaattcctccaaaatgccaacgtgatcatgtcttaatacagaaatgacttaagaggttccacgccacttgcagaatacaagttcagcatccttggtatgacctgtaagg

SEQ ID NO: 720 - DNA, 335 bp, Homo sapiens
gcccggcctgaagtccatcttaattctccttttcctcacgtcctaccatacctgtttgtcgagcttgctaatgttgtcacataaacatttcttgaatttgtcctttcacttccatctcctcctctcctgcctcagtttctcgtgggttgtcataatattagtagctttctcagcagtctgcttggccccttcctcttcccacctcaaggctgttcttcacactgaccaattcctccaaaatgccaacgtgatcatgtcttaatacagaaatgacttaagaggttccacgccacttgcagaatacaagttcagcatccttggtatgacctgtaagg

SEQ ID NO: 721 - DNA, 224 bp, Homo sapiens
cttgagacagggtctcactctgttgcccaggctggagtgcagtggcaacatcacagctcactgcaaccttgaactcctcaatcttcctgcctcagcctcccgagtagctggaactacaggtgtgtgccaccacacaggctaatttcttaaatttttgtagacaggctcttgttatgtggcccaggctcttcttgaactcctgacctcaagcaatcctcccacct

SEQ ID NO: 722 - DNA, 176 bp, Homo sapiens
ttcacaccattctcctgcctcagcctcccgagtagctgggactacaggcacccgccaccacgcctggctaattttttgtattttttagtagagacggggtttcgccatgttagccaggatggtctcaatctcctgacctcgtgatcctcctgcctcggcctcactaagtgctggga

SEQ ID NO: 723 - DNA, 480 bp, Homo sapiens
gaaaaagctcccagtcgatggcaccagccctcggccttggcaggacataagggaccctcaggctgagccaacatcactgtccccaccaagaataagtctttctccactgctggttccaaaagacatgcgtgacgggcaacaaaagccacattggagagtgcagctgtgctgtgagggtcgttcttggttcatttatgggggtagcggggcggggggaagaggaggacagagtactcttatgactctcctgggttgttttctagcctagggggagggtagggaatggggtttctgtgccagggaccccctttctcatcgacctcacacaacactggctcacacagctgggccagtctccttcgcaagaggaagccgctgtgttggggacttggacggcaatcctattcccagaagaggggtcttgtcctagaccccaagagtgtgttcttggatctctcgtgggaaagaattcagggtgag

SEQ ID NO: 724 - DNA, 264 bp, Homo sapiens
aatcccagcactttgggaggccaaggggggtggatcacgaggtcaggagatcgagatcatcctggctaacatggtgaaaccccgtctttactaaaaatacaaaaaattagccgggcgcagtggcgggcgcctgtagtcccagctactcgggaggatgaggcaggagaatggcgtgaacccagaaggcagagcttgcagtgagccaagatcacgccactgcactccagcctgggcgacagagtgagactccatctcaaaaaacaa

SEQ ID NO: 725 - DNA, 480 bp, Homo sapiens
gagccccagaaaaaaatgttaatatgcaggaagaggcaaaagggttgagtttctgactgttgctaacctcaccactgcctttaaaaccaatcatgaggcacacggctgatatttaatagcttttagctgattatttttcttctcctcctctttcttttctatccaagttgacctgggtgtacttgagtggaaatgaagtcatccaaatgctgaattagaataatcacaggcctctaagaatgaaatggaagcagagattaaatggcggagggaaagccggcattaataaggaccaggaaaactttgcataaaataaataggagatggaatagattgaatttgtatatgctgcttccatttcttcctccattttgtgttgtcttcctaagtcgagttactggcaaagtgggatttgatttgccacaaggactcataccttctgcagcctaggtgatgggcctttcttctttgtgggacgtt

SEQ ID NO: 726 - DNA, 522 bp, Homo sapiens
tagggagaagacctgggcaggatgcaggtagggtgactggttgtctgggtttgcctgtgactaagggggtttctaggaacttgggccttgcaaactagaatgaattggtcaccttcaagcggagtctggagaagtcaagacacttggcctgacactctaaaagggtcagcatcttccttgaccacctccaaggagatttaaatactccttcctgcgtgctccagaacactaacttcatacctgtttacattctgccttcttcatttaatccagctgctgggtaaacagccagcatggggccttgcgtgagcacaggccggcaagtgttagatgagcaagtggctgctgaaggcaggtcagacagacccacagtctgtctgtctgtgcacccctctgggcttctatttggcgattatttctgtgtctcttgaaaaaaaaaattctgccccaatgtagcgaaaagtgagcttcttgtagttaaagagcaaaataaggatttaattaaattaaaaaaaaaagaaa

SEQ ID NO: 727 - DNA, 420 bp, Homo sapiens
gcagttgatgagtcttcaccctgatgctgcctctcccatgcatgactcagtcaacttctagggcagtgattctctcctgggcaattttgcctcccaggggaatttggcaatgtctggagacactttttattgtcatgactggggagttgctactggcatctggtgagtagactccatggatgctgctaggcaccctacagtacacaggacagcccctatgacaaaatattatccagtccaaaatgtccacagtgctgaggctgaggaagcctcttctagagattgtcctcccaagctgctcgtctctttttccttcaccaactaaggctttaccttgtacctaagaaattcaattggcttttttgaaccttatatgggttcatacatgggcctcagagagtccacaaacttgcacaattc

SEQ ID NO: 728 - DNA, 444 bp, Homo sapiens
agaaataagggtcaggactcaaagcagtggacataatcaggacagaacaggccgaagtgcagacacaaaacagatcaataaaacccaacagctcagcaaaggtgaggcagctgtgtctccctctggctgccttttctcccctcctctctcaccagaagccaacgcgtacacgctgagtggagaggccgcgaggacaagacagtgggacatgcgtgtgctggggaagtcgagaagcaggacaggaggcaggtctgagagatctggtttgtgtcttgtgccctggttctctctgcattccttctctgtctctttttcccttcctcatgccttttccttagctgatttccctaggacagaattattttctttttcggactgaatgataaagaagtatttgtttcctaagtcttcatttcaaaagcaacaggatagaactctctaaga

SEQ ID NO: 729 - DNA, 3009 bp, Homo sapiens
gcgacagtcccggcccagttcagaagaacctgcacaaccctattgtacaggtaggtgtgccctccctggccacttgaaccctccctccaccccaccttgactacaacttcaccctctgttcccctgagcccacatccatgccgcacacccaaggtggagaggatttatgccacttccgctgagcccacgtccatactgcacacccaaggcggagaggatttatgccacttccgctgagcccacatccatgccgcacacccaaggcggagaggatttatgccacttccgctgagcccacatccatgccgcacacccaagatggagaggatttatgccacttctggagtctcaggtgggctggggcctgagccagtctcagcacctgggcccgcctggccctgtgccctgcagggctgtggagctgctgagtgcacacatgtcctccgtcctgatgccctggccatggcttaccctggcagccagctctataaaattcccattattattgaaaagctcatagcccaggcagtgggttttttgtgctgctagaaacttgattcatttttaacattttcaatattctgtcatcagagtgaggagggggctgcagggaggacaaacaacatgaatttgagggtctgcaggggtctctgaagtcacctttctagtcctgggctccccacctgtgggtctgcacaccacccattcgcaacggagaccaccagggaagtggttcaaatgcagattcctgggccatttgccctagagattctgatccaccaggtacagggtggggcctggaattcaggaaatccctaagtgtttggggaaccatgagtcaagtctaagccccaccccggttacgcatgatgccaccacatgtctttgtatgaagcacttggcagtttgcaaaactctcctgcagataccacccagatgccggtagtgtccctaacaggagggcagggtagaccttaccaccatcatcttatattgttttcccacgtcacagacaagaaaacgtctcagagcagctcaggtgctttccagggttccacaggtagagtcatgatcagaaatggagcccccggtggccatactgtctcctgtccagggcaagtaccaagccattgccttcggctgacgcaggctccagactcctccacattttccggactctcccaggcctccttgcccatgtcactgtgtgcttagtgccctggcacggcagacagggcctgtggccacccttcctccctgtggcctcgcatcgtggacatgaccacaggcagtggccgagtgcatggacatcctcctacaagccctcaacaagcaccctgaaagttgtgggcaaattgaatttaaacaatattattacagtacaaatgaccacagctgctcactgtactgaatgcctgtggcacaccagacaccgtccttggggtctttttctttctttttttttttttttttttttttgagacggagtctcactctgtcgcccaggctgcagtgcagtggcgcgatcctggctcaccacaacctcctcctgggttcaagtgattctcctgccttagcctctcaagtagctgggatgacaggtgcctatcaccacatccggctaattttgtatttttagtagagacagggtttcaccatgtttgccaggctggtctcgaactcccgaccccaggtgatccacccgcctgggcttcccaaagtgctgggattacaggtgtgagccaccgtgcctggcctgttctcagggtctttatcctctctttagcaacatcctcgtggcaatcttggaagggtcttactgttgtccctgagaggttctgtgactggtccctgtttgctcagtgaatgaggggctgaccttggcattccagccctggaggtggcttctcagccatcccagcccgtccctgaccccactggcttaaagctcagagaggccttccccaccccggatcccatccactgcagtctgcaccccagctaagcttggctttcttcttctcccccaccctcttccacgtggctcctgactcctcagtcactagaggatcttgaagaccaaaaacggaaaaagaagaaagagaagatgggattcggctccatctcccgcgtcttcgccagagggaagcagcggaagtccctcgaccccggcctctttgatggtaccgcccctgattattacatagaggaggacgcggactggtgatacgcgctcccctgcgcctgctgcccgcaggcgtgtctgtgcgtgtgggcgtgtgtgcaagcgagcgtgggtgcgcgtgtggccgtgcgtggggtgcgtgtgcacgtgtgcgctggcacacatgggtgctgggtgtggccgagcgcctctaacaagtgaaaacacgagtgtgaacctctctcccctgcgtcgccacctctgtaattgatgtacataccgcaaaccgtgtgtgaacctgtcaactctctgtcgtctttggagcgatacagttgtgttgttaatctggtttattatttttcttcagtgtttggtttttctttttctttttgtttggttcgtcggtttgtttttgtttttgtttttttccccctttctcctcccctcctcctttttatgaaacttgaaaacttgaaggactgctgtgtatttgtaaataacaaaactattgtgcactctgtgcttgtaaatgtccctcgtccaaaccgctactcctggagcccgtctggcagaggatgtggtctgtttttgatgtcccccctcccgcccccctggtgtgaacgtgtgggaccagaccctgtcctgggggtgcgcccaagtcactttaaccacaaaacgccatcgtcgtcagggtaagctctgctctctacaaagactcgcgagccgggccaaggggccttgtcttggctgggtttgtcagaggtcaaaccggctcttttaaacggcctaccagtttttaaattgcattgccgtttctttctttatgaaaaaaaagaaaaaaagaa

SEQ ID NO: 730 - DNA, 10388 bp, Homo sapiens
gcaggcggacctcccgctgaccgcagccatccggcagagtcaacagactctctaccactcacacccccctcaccctgcggaccggcaaggtgagtcctgccctggcctggctccaccacggcttcgaggggcttcacaggaggccatctgacccagtgggagaggcagctgctttgttcgtactacagcagcttgggggcgtgggacagagaccttgggctcatgtaactgaaaaatctaagagatggacagcaggcatagctggatccagaggttcaaacactatctgggtccctctgaccgtctctccatctcttagctctgcccacctccttttggcctcatcttcaggctgtctctttcagcaagaaagtaaaatagtcccctgcagttccagatgtttaagaccctcacagctcaagtcttaagaaagaaaaactatctctttccccctgtgtccatagcaaatcccaaagaaagactctgattggccacatcagagtcacatgggcatcctttggcaggggaggcagcagaactccttgattgacagctctggccaatcacagggcatccaagaggggctgatgtcaatgtcacaggtgtttgctccaggcactcggcagggaagtctggcctgtggacagcatctgcacctactgcccatggaacaggctccaaacttctcgctgtcctgttgcacgtctgcaggccaccttgctctgttctctgtcccttctgcaagtagttgcccttatgtgatagatgcaagttgggaacaggcatccagcagcagccaatgcaccagaggtaagagctggtcactgtgaaggctgcaggctgggctggctgttggagctgcaggagatgagtcagacacagccctgacctacaagggcctggcaggctgatcagggagatgccagcaggccctgctattgcctgtcaagggtacagatgggggagtgtaggtgagtcattgggacgaaggggcataggccctggattcagactgctgggttcaactctggccctgctgcttactagaggcatgacccatgacctaggccagggtcctcagtttcctcatgtgtaaaaggggcattaggctcttagcacacaacgtacgttaaagacgtttgctgagacttcctttacctacttcatggagctgtcgtgaagatgaaatgtgtaaaactgcgggaatggggctgggatcatggtcagagctgggtaaatattagctgctattctcattatcatcgtcatcatcaccattgttgtcatcattgataggtgacacaggggactttgagaacccagacagtaagcaaattcagagtcttcccttcccattgagtgggatagcagccctcccttcactgtctgacccaaggtggtgtgacttttttggggtaagcgtgggcagctctggccttcaaagcctcaactcagaggtggaagagcttataataaaactgctcggggccagcatcctcgtcaggcagggaaactgagacccagagagggccaccacttgttcagagtctcacagcccagccatgcagccagctgtcctggctttgggtccagccccagggcagcaggagggcagaggtgcaatttgaaggcagacagggcttgggcagtttctgaatcacgtgggggcagcagactcctggtcatcctcgtctgcctctgcagggcctctcctcaatggagctggctctggtctgggaaagcttggacaggctggtggatctgccctctgggcccttcctcctccacagtatctgcctcacatacaaccatctccatgcattttatcagacaccccctcctccaggaagccttccgtgctctctcccctgtgtcctctatgctcctgtaaagttgggtgctcacctgcgtcatagcacctcttaccctacctcgggtttgctgttgatgcatttgtcacatgactcctcccatctgtccagtgcctggcactgtggtaggctcatcatacatgtggctactgtctgggattggtaccactggcatccatccccatgttacacataacaaacctggctcagaggggctagggaggatgcccaaggtcacacagcctgtagggtaaactcacccagattggaattgactccaaagccagggctccttcagccacccatcttctgtattagagcatatggccattggtggcaaggactgtcttttgcaggaatgcaaccccacctgctggcatgccgcctgcacatggtaggtgcttagccagtcttgtcaaacaaaagatgctttctccatccagtgccaatgcctgcagacaggagagcaacctgctggggacttggaagggcttctgagctgtggcttctggtctggaccttccattcaaccactatttattgagtacctattatgtgccaggcaccatgagctctgggattcgacaggataagacacccagggtacctgccctcacagagcagatgttgtcagtgtacagatatgatatgtaaatatactattaaataacaagcaggccagatgcagtggctcacgcctgtaagcccagcactttgggaggctgaggtggacagatcacgaggtcaggagttcgagaccagcctggccagcatagtgaaatcctgtctctactaaaaatacaaaaattcgctggacttggtggtggcagatgcctgtaatcccagctactcgggaggctgaggcaggagaatcacttgaacccgggaagcagaggttgtggcgagcaaagaacacaccactgcactccagcctgggcaacagagcaagaccctgtctcaaaaataaataaataaataacaagcagaacgatgacagattgtaattagcacaaggagagaaatcaacagaaaacaggcactttttttttttttttggagagatggagtcttgctgtgttgcccaggctggtttcgaagtcctgggctcaagcagtcctccctcttccgcctcccgaagtgctgagactacaggcatgagccaccatgcccagccaaaagcaagcactttgataagaaccaacaagacagggtagggagagctgattactggggaaggcctcctgggacaggctgagacctggaggatgacagtgcccctgatgggcaacaggaatggcagagaccaaggcagggggacatggcctgtctcaggcagtcagaaggctgatgtggctctagccgaggctgctggggtaggcagggccgtggcacatcaggccacctcggaggccaggaggaagagagatgagatgctggctggtggcccatgctctggtgtgtagagtggagtcagcgcgacccaccgggaggcctcatggtcttccaggcgagagtcagtggtggcaatgcagtgggagagaagcaggcagatttggggcaatgttttggagctgctgctgccgattggatgtgggatatgggggaaagagagaaagtggtggtggcctttaggtttctcatttgggaaaccgatttggggcagtggttaggattgcaccaggtctaggaatgtccaggtggtgggagcatgtgagtagagtcacagagtactcacgtattaatgcatcacggtgctgcttagaaatgaatttataaacatcaagcactttcctgtattggacttggaaacgaggagacttgaatttggaatgagaagacttgaaaacttccatgtcttctcctcgttcacgctggtggaggagggttcattggatccagaggctatgggaggttcttcccagcagctgctctatgggaacgtgtggagctgtggagtagggggttggagaaccaggcaagtctcttcccttctctacacctcagtgttcccatctgtagaacgggggtgttgggtggaataaccgccaaggcagcacaggcgaggacgttctctccatccctcactcaccagctgtccctgctttccagcggtcagggtgagcccctgccactcccggcagccctctgtcatctccgacgcatctgccgccgaaggcgaccggtcgtccacaccgagcgacatcaactcccctcgacaccggacacactccctctgcaacgtaaggccagcagcagcggggcctgggcccctgggccctgcccagaaactgcaggggcgggggtggcggggtgaagccatactcgctgtttcctctcgtccacccagggagcactctggcgaatgcatttcctgttctgttctttccttttgcaagaagcgatggatgtggggagaaaaaggaatgaggcccgtttgctccttgtgtccgggagggtgaggagaatccagaggaagcgggcctgggtcggccgcaggcacagcctggaactctgccccagtgggccctgtctgggaccgtgggcttctcctcccacacattaccttccagagctcagggcctccccagcacctcctcatttccctttagagccagctctctatcctgacccaggagtcttggcatgaattgcctctggagaggcttgtgaatatggtctaagtttgtttcctttgtttatttcatcaaacactttttgattgcatactgggcaccagctcccaggaggcaaaggccctagctgcctagctcttgatgactagtggggcagacagatgggctctgcaacagtgtgggagtaaattgaaggtgggttgagcttctgaggacagttggaagccatgtcgaggctctaacatgaaatattggggtctgggtgtggggaccaccttgaatttttgttttatcacacagttggtaatgcagaggctcccctctgccatatcctgaagacagacatcatagggttagatcctcaaatgcacgagacggctttttccaaaactcagttaatgtcactttattaaccagcgaaatagataataaaaaagaaatgaggtgaacacattggacaaaaccattacttgccagtgacatgattctctacctggagaactcaagagaataacttgaaaagctattagaatgaataataagcatgtacataacagtgttgcttggaaatcagtgtgtaaaaatcaatcactttcctatagatgagtcgtaattatggaaccatttttttcaatccacaataatgaaaagtgcttataaaaatagctaagagtaaacttcagagaagctgcctcagtctgctcaggtgggcggcagagattgctggcccggggactttagatggcctcctcagagtaggaaggtcatttgcagcctggggccctgctcaggcctgggattctcttttttattgttttattttatttatttgtatgtgtgtgtgatggagtttcactcttgtcacccaggatggagtgcagtgacgcagtctcagctcactgcaaccaacaccttccaggctcaaacaattctcctgcctcagcctcccgagcagctggcattacagatgcctgccatcacacccggctaatttttgtatttttagtagagatgagatttcaccatgttggccaggctggtcttcaactcctgacctcaggcgatctgcccacctcagtctcccaaagtgctgggattatagacatgagccactgcacctggcgggattctctgttttatactggtgctttgaggaagcagtatgttcttctcttgtccccagaagagaatcctagtgacaaagtctatcttgactaacagaaccaaggcaaggaaggtgggccactggaggggtctctgacatccattccctgatcctgaaggaccactgtggagttatacctacagccagcagtgtccctgcaccattctcatcccagttgagaataccttccccccacggccatattttgtcttctcgtggtgggcccatggggactctggcagcagaaatgctgctggaaaaaccccattctgcagaaggagttctccaaaggcctcttgaattgcatttgacccagtcctagtcttttgcccaccatagccttggcacattcctgctgccaggaaatgggtgctttgataagccagttgtctgcatacaggcgtttcagtgagcaggccccattctctttacccatagatttggcaaagatgttcctatccagagtggaactatcttagctgccttcagaatggattctgtttgcaaaccttgagactaaagactaaactaccattcattaattccctcacttcctcaaccctttttatccccccatctcaacaggtgtgcatgcaggtaagccaggaagagcccaaaaatagctacaggtaaccctttgccttgggcatctgacgtccaccagcaagaatagtgcagcctggactaatgactgcctcatcctctcacactctggccactaatttagagcaaaagtaggaactcagcatagagaggttggagaaggttgacggaccttggcattatgcttgcaattccagaaataaccaccaggagtctccctagtaatgactgttttgatccaaaggatctgtgggctccagacagggcagactgattctgggatgtagtgaaggcttttgtacacctgtaggctattaagggttccctccacacccacgtaaggcagggctggcaacacaatggaaatgtcctacctgcccatcctagggacctgtcgtctgaggctccctaggaaaaagggaaggagttcagacccctcctggggcagcccaaagctcaggaccaagtatgcagttaccctggagctcctgcctggaaggagcactgtgccaggaggaatctgacagcccccaattggagctgtagctctgcatccaattagctccacggtagtggactgtctgctgcctctcttgatatctgtgaatagggctaacgagtcctgcctgcccctgcgcaaactaagagattcattgtgtcggttgtgggggaagctagaggctacgtggtctcccaagtttgtttctgtcccaaaattctctattttgtgctttttctataaaagtacatttctttatgaaaagcaccaagtctaaccaagctctagctctaactcagaggacagactgggacaggaacttagacgccctggagtggctaatttgttggtcagaagatgctgggggttgagaggccagactgggcaggagaggaccccaggaactctagggaaactccaggccccatcaataagccatctgggggtatctgcttcaggagatggggggtgggctccccactgcagaggcagggtggcccctgagagatggcatccttccacggaaggccccacaccgcacgggccgcctctgctctcctgtgtcacctgtctctgctgtttcatcttcctcttctcctctggctacagggcgacagtcccggcccagttcagaagaacctgcacaaccctattgtacaggtaggtgtgccctccctggccacttgaaccctccctccaccccaccttgactacaacttcaccctctgttcccctgagcccacatccatgccgcacacccaaggtggagaggatttatgccacttccgctgagcccacgtccatactgcacacccaaggcggagaggatttatgccacttccgctgagcccacatccatgccgcacacccaaggcggagaggatttatgccacttccgctgagcccacatccatgccgcacacccaagatggagaggatttatgccacttctggagtctcaggtgggctggggcctgagccagtctcagcacctgggcccgcctggccctgtgccctgcagggctgtggagctgctgagtgcacacatgtcctccgtcctgatgccctggccatggcttaccctggcagccagctctataaaattcccattattattgaaaagctcatagcccaggcagtgggttttttgtgctgctagaaacttgattcatttttaacattttcaatattctgtcatcagagtgaggagggggctgcagggaggacaaacaacatgaatttgagggtctgcaggggtctctgaagtcacctttctagtcctgggctccccacctgtgggtctgcacaccacccattcgcaacggagaccaccagggaagtggttcaaatgcagattcctgggccatttgccctagagattctgatccaccaggtacagggtggggcctggaattcaggaaatccctaagtgtttggggaaccatgagtcaagtctaagccccaccccggttacgcatgatgccaccacatgtctttgtatgaagcacttggcagtttgcaaaactctcctgcagataccacccagatgccggtagtgtccctaacaggagggcagggtagaccttaccaccatcatcttatattgttttcccacgtcacagacaagaaaacgtctcagagcagctcaggtgctttccagggttccacaggtagagtcatgatcagaaatggagcccccggtggccatactgtctcctgtccagggcaagtaccaagccattgccttcggctgacgcaggctccagactcctccacattttccggactctcccaggcctccttgcccatgtcactgtgtgcttagtgccctggcacggcagacagggcctgtggccacccttcctccctgtggcctcgcatcgtggacatgaccacaggcagtggccgagtgcatggacatcctcctacaagccctcaacaagcacctgaaagttgtgggcaaattgaatttaaacaatattattacagtacaaatgaccacagctgctcactgtactgaatgcctgtggcacaccagacaccgtccttggggtctttttctttcttttttttttttttttttttttgagacggagtctcactctgtcgcccaggctgcagtgcagtggcgcgatcctggctcaccacaacctcctcctgggttcaagtgattctcctgccttagcctctcaagtagctgggatgacaggtgcctatcaccacatccggctaattttgtatttttagtagagacagggtttcaccatgtttgccaggctggtctcgaactcccgaccccaggtgatccacccgcctgggcttcccaaagtgctgggattacaggtgtgagccaccgtgcctggcctgttctcagggtctttatcctctctttagcaacatcctcgtggcaatcttggaagggtcttactgttgtccctgagaggttctgtgactggtccctgtttgctcagtgaatgaggggctgaccttggcattccagccctggaggtggcttctcagccatcccagcccgtccctgaccccactggcttaaagctcagagaggccttccccaccccggatcccatccactgcagtctgcaccccagctaagcttggctttcttcttctcccccaccctcttccacgtggctcctgactcctcagtcactagaggatcttgaagaccaaaaacggaaaaagaagaaagagaagatgggattcggctccatctcccgcgtcttcgccagagggaagcagcggaagtccctcgaccccggcctctttgatggtaccgcccctgattattacatagaggaggacgcggactggtgatacgcgctcccctgcgcctgctgcccgcaggcgtgtctgtgcgtgtgggcgtgtgtgcaagcgagcgtgggtgcgcgtgtggccgtgcgtggggtgcgtgtgcacgtgtgcgctggcacacatgggtgctgggtgtggccgagcgcctctaacaagtgaaaacacgagtgtgaacctctctcccctgcgtcgccacctctgtaattgatgtacataccgcaaaccgtgtgtgaacctgtcaactctctgtcgtctttggagcgatacagttgtgttgttaatctggtttattatttttcttcagtgtttggtttttctttttctttttgtttggttcgtcggtttgtttttgtttttgtttttttccccctttctcctcccctcctcctttttatgaaacttgaaaacttgaaggactgctgtgtatttgtaaataacaaaactattgtgcactctgtgcttgtaaatgtccctcgtccaaaccgctactcctggagcccgtctggcagaggatgtggtctgtttttgatgtcccccctcccgcccccctggtgtgaacgtgtgggaccagaccctgtcctgggggtgcgcccaagtcactttaaccacaaaacgccatcgtcgtcagggtaagctctgctctctacaaagactcgcgagccgggccaaggggccttgtcttggctgggtttgtcagaggtcaaaccggctcttttaaacggcctaccagtttttaaattgcattgccgtttctttctttatgaaaaaaaagaaaaaaagaa

SEQ ID NO: 731 - DNA, 1559 bp, Homo sapiens
tatttgcacaaatgctgaaaacttattctatctaaattattacataaatattggaatgtctatttttccatggggtgggcgggaggtgggtgtctctgttgacttgtctgttctgttaccatgctgctacccaactgtgcaaagtagtttagggtggccagaacccagggaccattggatttcaaagcttgctttttctgttggttcttctctctccttctctctctgtctctcccattctcctgcccatgcatgaaaggatcctccaccttcttcccacccagagctccctccaggcctttctctatatatttatttatctgacatacagaacacgactttagtgagcagagtgctgacagtcatggtccccttctttgggtctgtcttttgagagaggttgagttcagggcaagacagcctgccacacatccaagggtacgaccagtgggaccctggcctgagtctgttctccgaggggcctccagcagcttctgttcctccctgcagctgtgtctttcttgtcctgggtttaggatgcaggtgggccaggcaggtgttgttaggggaggcacccacttcaaaaggagggccacagtggggacacagagtccagcacctgagccctccaccctccccattctggttggttccatcagccacacttagaatctcccaggatcccttggactccgtcccccaacttgtcacagcagcctgagcctacccaccccaggagacaagagctggcaggaacatctgcctatatggggggtggcgttggccccaaagaggcttcaccagcaaaggaactgtgtgtattttaatgccaggggacggaggatgtgtgagctgttcagcaaggtctgcccaaggcctaaaactcaatttccttattcttttgcttctgctcgtccttaacaactaacagctcaacccacacctctagacaacagtagtcgtgctttctgctaacggtgacattttcagctcttaaaaagaagcaaggagattttcaaatgctagagtatctctatcagaaggcataggacattgtgtccaaagtctcaagaacaaacaacactttccttctgacctggtccaaaagtcagcaaacagcaagcaggcagaggccctcataaggacttttctgtcctcctttgaccaaactgtttaaccgagcctaggggtgacggggagcgacccaagctggcatctttctctacggagacagattttagaaaatacttttcttgcccatgaatttcttttctggttgatttttatcattttccctttacttacaagaaaataagattgcaaccactcctgctaatgatttagtagttccttttcatttcagtttttgtaaattaggagataattctaagagttactaaaggatgatttatttaagagaactacgtcaaatagcgaatgagttatgggtaacattagacgaaaataacctttcccgtgggaaaggtttctcgaaggcatggatgcaaatataaaatattaaaaaaaatctaaataaagcttattttaaaatatgatcg

SEQ ID NO: 732 - DNA, 1559 bp, Homo sapiens; identical to SEQ ID NO: 731

SEQ ID NO: 733 - DNA, 952 bp, Homo sapiens
ctttcccgggatttcggggatgacacgggggccaggtgagggggctgcgcacttctggatcggccccacacactcggcccctggcgcggcgcgctccccgcacacgcgcccgccccctccccgcggtcacacgcacgcgccctcgccctcgccccgcgcgcacaggcgcgtactcccacccgcggccgtgcacccgccgcgctccttcccgcgcgtgtcctctctccccgagcggccgccaggatgtgcccccggccccgtcgtcgccgcgcccgcgcccctcgccccagtacgtcttttttcgtttcctaaatttcttatttttgtccttgcaagtggtcctgtctggtgtgaaccgtcagcacagatggcctcctggagcttccccgagtcgttcgctgggggaagcgggcggtgagcggccagcccgggcgctccgcaggccgcgagctcccggcagggctggtggcgggggtccgcctgggggaggaatccccgcctgctccatcggacccggcctggcgcggctcgcggcgctcggcgggctcccttccattctagaatcttcccgcttgcttcccagcccgcgttcttccgcctgcctttaattgtgtaagtttgacgaagtcagagctttgggttccaggaaaagcgcaggagggtcatagaggaagggagggcgcaggttggagtcaggtccaaacagtccctatcgccacttttgaaaaaaaaaaaaaacaacaaaaacccttaaggttggttttattttgccttttggtagcgggcgtattcatttagatttttttttcaagacaggcaaataaaaggtgtttgaaatctctagttatcccgtttaacacacccatcgatggcgcttttctagttaagctacgggggaaacgtctttatcccgcagttaggctgcgaacttgtgcagatgctcaggctttgt

SEQ ID NO: 734 - DNA, 612 bp, Homo sapiens
gaaagaatacagagtaaactgttaagcactatatacatgtttgtataatcagacgattgttttcaaaaagtagtaatagcacaccctgagcggttagagttgctgatgaaccttgcctgttttcagggattgcctccttggtggagcatcatgagtccagttcacttgtaaatagaaccttccctggttctttttgaatttagggctactggtacgagctcagccccggtgggacccaggagtttcacagtggtctccaacttcgggatttctgacaagctcctaatacagtttatttaaaaaaaaaaaaaatcctagagtggttgagttgccttctggggaaagcctggtgggggtgcgttggtgccttgggatgagcaggactttgtgcccgccccgtgtgaacttttacttcctgacagcaatagagatggacttgcctgtgaggtcgggagctgtatgctggggactgcaaaggccatgccttggtatgggctagtggccatagtaacgacactactgtgggcagagctccatgttaggcccaacaggcaaccaggcagggaggaaggacgctgggaagcaaatacaggcaaacagcatcttcagatg

SEQ ID NO: 735 - DNA, 612 bp, Homo sapiens; identical to SEQ ID NO: 734

SEQ ID NO: 736 - DNA, 590 bp, Homo sapiens
gaggagtggagtgggccaaatgcttgtaaactgcctgggagagaggtagagaatggcaagtggatctaaaacaaaataaaatacccagaccctgctgttggcaaaacatcaattggcctagttaatacaggggaaacttaggggaaccttctggttagactgagaggtaaaactaaagaataactggagttgccagaaaagtggatggtagcatgatgtcataaatttgacaggcagacctgcatgttaggaaaagcacacggttcaggaaaggctcaagtgtcaggtctgagaagcccaaatagcatttatgtgcaaacaaggaacatatccatctgtattccttcctgtttttctgactacttaagattccatattagatgctcctgacctccctaaatctggcccagggcaagaagggtgactgtgcattggaatggcatgcatgggagtgctcatttattcagaaatcatttgcagagcagcaaccatgtattagttatatgtgtaaaagtagtgggcattttcttccagcacctaagaggagtgggcaatgtggggaaagataggggaaatgttttacagatgcc

SEQ ID NO: 737 - DNA, 3359 bp, Homo sapiens
tgtaagcagggaggcaaaagatttgcgaggtgctttgcagaagagacttaaatattgttttgctttgactagcttaaaaaaatgattttgctaagctatctgatattcatatttggcagagcaaaagacgagaaaaattacaaagcaagaatggtcccaagtacagatacagatgagaggcatcaaaaaccacatttctagggtctgggtgacctaggtgaggcagcatggaatagtgggaagagcatttccccacggattgaagaccagcttcaaatgccagctccagcactcagcagcgatgtgacaggcagcagatgaaactctcagagcatcaatgttttttaatctctaaagtgatactaattatagctgtcctgcctatctcacagggtatttatgatattcaaaatccgtatggggagatactctgaaaattaaaaaaaaaaaaacaaaaaacaccatttcggtaatgatgcaaaatttttcctcatagaagaatgagggtagtagtctaagttcttccaaagtaaattcaagccttgcaaaaacttactcttttacggtaaggaaaatacaagttaagatgatttccccatttttcaacatttaatttttctcattttattatctatatagaattgggagtttactacaagggtagaaacttggaattaagtcctttgttaaaaaaagaaattccttatttatttattaattattattatttttttgagacggagtctcactctgtcacccgggctggagtacagtggtgcaatctcagctcactgcaacttccacctcccgggttcatgcaattctcctgcctcagcctcccgagtagctgggattacaggcacacaccaccacacctagaggtggggttttaccatgttggccaggctggtcttgaactcctgacctcaggtgatccaaccgccttggcctctcaaagtgctgggattacaggcgtgagccaccacgcccggcctcaaatgttttaagtatctagaagtaaaggtttgggatctttacaagataattctagtcatatggggcctaaatatgcctttctgcagagaaaaaagaaaaaaaaataaggggcctaaatagaatgtaacgtgaggtaagcccagggagtacgttttccccaaggattaaacaaagactcactattcttactttcagaaaacgtttcccactcatgcaaaaattacacactaatcaacatttactcacgcgaaaaatcctagaatgccctcttcccgatagatggttattatggaatcacaaagtccactacgtacacaagaagaaaaggtaaaatatattaagattcttttggagctataaacaaaataatttcaattatcacattggacaaggtcaaatccacgacctccttccctcacacttttctagcactctctcactctgcaaagatagctaaatttggagatagaagtgaaaatattaactacctaggggtatagtcatatggagtcaggggctctgcaacttactctgaaatcctacgtaggctactaaacctgcctgggtatattttctcccattttattgttttttgtgcagatcaaatgacatcagatacgaatttgttctacaaattgtaagggtatcataaaaatacaaagtagtattattctagtactttggcttcaaaagatctccttgagtatgtgaaaacaaaaatacttaccagtacttggattctctgccaatgaactgtaccatagatctcagagtgatcactgtggaatatagagaaaagatgtttacaactatgttaaggccaggtgcggtggctcacacctgtaatcccagcactttgagaggccgaggtgggcggatcacctgaggtcaggagttcaagactagcctgaccaatatgatgaagccccatctctactaaaaatacaaaaattatccaggcgtggtggcatgcacctgtaatcccagctccttaggaggctgagacaggagtactgcttgaacccggaaggctgaggttgcagtgagccaagattgtgccattgcactccagcctgggcaacaagagtgaaactccgtctcaaaaacaaaaaacaaacaaacaaaaaaaaactatgttaagatagattttgatagccctgggaaaaaaaaagattttccacctaaagacattttgctatctggataaattggataaaagccaaaacaagcaagcaaacaaaaacatgcaggcaaggcattttagtcaactcccacgtcaacctatctaagtggtcaggagagatcaggttataaaagaaaggtcagttgtcaactgcaaacataccatggaagggatgtgtgatgagggtagcagcagaacgagcgatcatctctcgagttgtctagaaacaatcaacacacacttctgaaatctaaacaaatgacactcaaatgcctgtgagaaggaatgtgggtggatatcgtggtataggataagaaagtgaatgacacagccctcctgccctggctggagtcaagaagagtttgaatgggatgtgaaagatctcattcattgtcattttatcatacttttcactcatggatctcaatgttctattatagttacttctcaaaatttctctgcaaagcaggcttctgttgttttctcaattttacaggtaagagaaaaaaataaagaaacaggaaaggtcaccaacaaagtcattaagctgaaataaaaaatatgaggcctttattgagattattaagttgctctcttattggtaagtgattttggagagtctgacatcattctagataaatgacaggctccatttagtctctactcacatttttgggagaagagaacaattttgttttgtgactacaacccagtaactgtgcagtatcttagagctgctgtgtttttcctagtttatctttctactctagggctctgtaaggaagtaataaagaaaattaaattataatctttgcatttaggttctgggattgcaaatgtaagcaggtctaccattggcttttgcattttttttttttttttttaggacagtcttgctctgtcacccacgctggagtgcagtggcgcgaactcggttcactgcaagctccgcctcccgggttcacgccattctcctgcctcagcctcccaagtagctgggactacaggcacccgccatcatgcccggctaattttttttctttgtattttttagtagagacggtttcaccgtgttagccaggatggtctcgatctcctgacctcatgatccgcccgcctcggcctcccaaagtgctgggattacaggcatgagccaccgtgcctggccggcttttgcatt

SEQ ID NO: 738 - DNA, 465 bp, Homo sapiens
ttttttttttttttttgagacaggatctcatctctcttgttgcccaggctggaggtgcagtgagctgtgatctcacaaccttgacctcctgggctcaagtgaccctcccacttcagcctcccaaagtgttgggattacagcatgagccaccacacctgtctaaaactaattttgaggacaaaaccataaaacactgattattagaataataaggcagtggtcaaaatgatcaacctgattcaatattaacagacaaattcatattatactaaaatgctttagggacgaatgtaaaaggatttcaaatactaaagaaaatgagattgataaccttttcacacatcctagaaatacagtccctggaaaaccacatttatagtatatctaagggacaattcactacctttgttttacacagctagctttctaccagatgcgttgaagaaaatccctctctgtactcaa

SEQ ID NO: 739 - DNA, 623 bp, Homo sapiens
ctttttttttgagacagagtcttgctctgttgcccgggctggagtgcagtggtgcgatctcagcttgctgcaacctccacctcccaggttcaagtgattctcccgcctcagcctcctgagtagctgggattataggcacacaccaccatgcccagttaattttttttgtatttttagtagagatgggatttcgccatgttggccaagctggttttgaatgcctgacctcgtgatctgcccgcctcagcctcccaaagtgctgggattataggtgtgagccaccacacccggcctagtcactgagttttaagacagccctcaccccttctccaagggcataagatcctatgggactggatgggcaaactaaggaaaatactaattgcatagtaatacatgtatccctgctttttttttttttttttgagagggagtctcgctgtctcccaggctggagtgcagtggcgcagtcttggctcactgcaagctccacctcccaggttcacgccatgctcttgcctcagcctcccgagtagctgggactacaggcgcctgccaccatgcccagctaatttttttgtatttttcgtagagacggggtttcaccgtgttagccagggtgg

SEQ ID NO: 740 - DNA, 9456 bp, Homo sapiens
ggcgcacgccagtaatcttagctacttgggaggctgaggcaggagaatctcttgaacttgggaggcggacattgccgtgagctgagatagtgccactgcgctctagcctgggccaaagagtaaagatctgtctcaaaataaataaataaataaaaaataaaaacaacaataaatgactgtgtgtccttaggcaaggcacttagcaactcttgagcttgttccatctgtaaacccaggacgttagtgattctccctctagtggatgaaatgaagcaatgcagatagagccctaatgcagggtacctgcgagtcgctgcagcagctgtggcaattgtcaccttcatccaggcccatcccgctttgagggcctagagagagtgggccagaggttaacccccgattcatctgcctccccacgctgggcatctgggtgtgccagggcattcccccgctggtcagacaggtttttgggccagggcggggctgaccagggttaattagagggaactggctaggaggagctggggagggggctgggcagagtccaggcctccagagcccctgggacacagcaggtgtgtgctgccatgggccggggcttgaactctgccagactcaggcgccaaaaacggcgcttgcgacctcaggtccagaagccccggcagcagctggaggtgagtggtcatcagagatccccccaccccaacccttgccccgggcccacgcgtcctgtctgctcggaaccttccctctaaatctctgggtcttgctcacgcttcctccctcactctcccttgcttttgtgtctgtcttggacacaaggcccccttaggctttctccctaggtgtctgtccctccatcgccatctctctgtgcctgcccagtctcatcggtgcctctctgcctctgtccctctgccctggcccccacagcggctccagcaggagaaccatgagctccggcgaggcctggcagcccgaggagccgagtgggaggcccgggccgtggagctggagggggacgtggaggccctgcgggcccagcttggggagcagcgctcagagcagcaggacagtgggcgagaacgggcacgggccctcagcgagctcagcgagcagaacctccggctcagccagcagctggctcaggtgggatggccctgaccccagggccctggacaaggttggggaggatgcctgggtccccagcggggagtaggtgcattgggcttggtgctgaggctcctctgtccctctttccacctccccaggcctcccagactgagcaggaacttcagagggaactggacgcccttcggggacagtgccaggctcaggcactggctggagcagagctgaggacgcggctggagagtctgcagggggaagtgagtgtcagctggggctgggggattatctgagccaaaaaagccgggctgagggctgggaggggctgcccctgtccccagctctcaggcctttccccagaaccagatgctgcagagccgccggcaggacctggaggcccagatccgaggcctgcgtgaggaggtggagaagggtgagggcagactgcagaccacccacgaggagttgctgctgctgaggcgggagcggcgggagcacagcctggaggtgacctgcagggctgggggactacaactgcctggacccttagcaatggcttcagggctttctgggagatgaggccggagctggatcactgggaggcccagaggctggcccacaagagcatgggcattagcccatgggcaaatgggagccacggaaggctgttgagcaggtgaggcatgctcttagagtgcatcagagcctggcagctggaagagcagggagggggctggtgccagagctcaggccaggaatgacagcccctagaccacggctgcgcaatggagacggagaaaaagaaatgaaaagaggatgcggtgtctgatgttagagatcaaaggagtctgcactttggggtcagcttgccttccttcgcatcccggtgccccttcttacttactactgtgggacaagcagcctcagtagcaccaataaatgctgcatgaaacaattactgaatgaggaggtagactgggcaggggaggagatggggctcttcgaggtgcggccctgctctataggcgaggaaactgtatatatccgctgagggaggtgcacggcccaaggcgcccagcgatccaggaacgggaacagcctgggccgctggggtgcggggctctccgcggcacccccgtgtggacctgccgcgggatgtcggcgttgcgtgcgtcccgctgaccgcccgcgcttccgtctgcgggaccgtccacagctggaacgcgcacggtcagaggctggggaggcgctgagtgcgctgcggaggctgcggcggcgcgtctccgagctggaggaggagtcacgcctccaggacgccgacgtgtcggctgcctcgttgcagtcagaactggcccacagcctcgacgacggcgaccagggccagggcgccgacgcacccggagacaccccggtgagctcgtggggccccagcccccttacctgtgccatcgagagggttgcaggctccgcctttcctcctttccccaataaactccacaccactaacccatttctttggcccacagaccacccggtccccaaagacccgaaaggcgtccagcccccagccttcacccccggaagagatcttagagccccccaagaagcgaacatccctcagtccagcggagatactggaggagaaggaggtggaagtggccaagctgcaagatgaggtggggcagagggcacggtgctggatgcacggcccctccagctgtcagtttctgtctcccatgtccacctcccagcctttgcccactaagctccctatacctggatcggctttcatctcaacaaacttacttcaagagccagcctgtatgccacctcctccaggaagacttcctggacagcacctctgcccttagttccactcccaatgcttctccctgcatccctcctgcagggttataccactccaactaaccctgctccaccccaccccgcaccagcctgaggggctcagagggctcatatcggagtctccagcacagggccacggctgcctggggtgtctgtcgcaggcagaggaggggtggggagagccagagtcggggctgctgggagaagcagggaggcccattggcccatctgccgcacggcccccctcctctgctcacagatctcgctgcagcaggcagagctgcagtccctgcgggaagagctgcagaggcagaaggagctgcgggcgcaggaagaccctggggaggccctgcacagtgccctctcagaccgggacgaggccgtgaacaagtaagcctcaagccattgaccaccgccccagcgccctctgggccctcctgggctcctgattcctcttctgatacgggttatgatccccactcccacccaggggccccctgacctccttgatctaggtgtttgcagccctcctcccgcccgggtccagaagtcccccgccaccccggctccctgaggccctagcgccctcaaacgcgtcttctgctcctgcccgcctagggccctggagctgtccctgcagctcaaccgcgtctcgctggagcgagactccctgtctcgggagctgctgcgcgccatccgccagaaggtggcgctcacgcaggagctggaggcctggcaggtgaggggcggggcccgtgtgcggggcggggcaaggggcgggaccggcgctgagccgaccacggcctcccgcaggacgacatgcaggtggtgatcgggcagcagctgcgctcacagcgccagaaggagctgagcgcctccgcgtcgtcgtcgaccccgcgccgtgccgcgccccgcttctcgctgcgcctgggccccgggcccgccggtggctttctcagtaacctcttccgaaggacctgacggctgggcccagagggctgcccttgcccacttaggggctcactttcctcttcaggccaatggagcgacagggcccagattgtcttccaaaagaagctgatgccctccccgccccaggatgctgggcaagggctcatcgggagcaggggctcatccggagcaggggccagctttgtggggcaggagctccaggtgggtggcaggggcaggtgaacagagctattttccgaattaatataggtctatcttttctagggcagggatggggctgggtatttatgtatcaagatcggacagagtaatatataaatcactccaccgatttggcccccattcatagaaagaaagagcatggtaaaaaagcctgaaactttattgtaaaaaaaaaaaaaaaagaaaatgaaaaacactctaaaaccctgagctggctgggggtgtcgtcagagatcagaaggacagggagaaggctcggtaacccaggttggtgaagacatccacccggcagctgttgcctgcagctgtcaggacctggaggaaagaggggcatgactggcctgcccacacccctgcctcccagccgctccgcggcccctgccggacccaccttgcactcaggcgcggcaggctgctggttgaggctgaggctgagcagccctggggaggagccaggcacctgggccttcagctccccgctcagctgccactggttgacgcagcggccctggccagctgacagaatctgcagaggacagggaaggtgctcaggggtcaggactgaagggaagagtcagtgggggtggcagaagtgagacacagggcctcaccaggtcctggtagaaggtgacgtgcttctgtggcgcccggatggggaagatggtggtgggtgtggaggatcggaggtgccagagggtgagggctgggccccctccacagacctggacagaaaggtgggagtccccagctgtgaaccacaggcccacagctgacagggcccggagctgccatcccatcccacagtctgcccagctcaccatccagtcggaatcagttgccaaacatccaatccagcgcccattgtggggcctcgagcactcctgggatggggaggggaggagggaaagaggtgaagacctggagaattcaaggagttgggggagaagaggacaatggccacggtcacaccctcacctcgtgcttatagacctcgatcgtctggacctccttggctgtgcgcaggtctgcggggaaagaactgtgagtggtgccccacttgcctcagcctccttcactgccatcttgccctccaaccagccacctgcttaccccaaagtcgaacagctccatcctcgccacctgacagcacctctgggctcctttcccgcagtgccaggcagtggatgtagtctgtgtggccccggaggaccctctgcatgtagaggggcgatgtcaggaggagacctaggaagagtgcctctccctgacctagacctgctctagggctccaggaccctgctcaccgtgaaagtcccagtttcaaggtccatagtgtgcaactgacagtctcccccagccaggatgagggaattctcctgtggaggagcaggatgaggcagaaagtcaatgtcaaatcaggataggcagagggtgaaggatcaaagtttggaccaagaacagtcacatggggctcagaccttggggaccagcagcaaagcgttgatctcaggcacttccaggctggtcctggggaaggaaaggcaaggtcagtgaggaagtggcttcaccctgatgcaccctctatccacgtggccctgctcacctgtatggaggctgacgacgccacagctccttacagcccttcaaaagagaaaataccaggtgacctcaaaggctctctctgggtccaggcaccccagccctttcccaagctcgactccttaccttcttgagcatctccgcccaaagccaggccttcacctccccatccccagcactaagcagatgtcgatcggtggaaaccatgctatagacgggcccatcatgggctaaagagaaatgcagaactgagtgagccaatcccacccaaagtcctgaagccagactccacagctatacccaccttggaaagtcaccaccggcttcttactttcctctttggcttctgagctcaaagcagaggacaagctgcagggacagcggaggggacccaggagtcagaaacgggggcatccgtcccatgagggccaagtgccagggctaatgggtggacagcggcagagggtacctgaagatggcaatctgcccgtaattgttgccagccgccagaaacttcccacatggtgagacgctctgggagaagatggtcatatggagccgctgcaaggcctggaacacctctgtctgcaggaaaagactggatgaggcctgcctgggacgtatgaaacctcccatccacagattcctccctgcttccccgaaaacctgccaggcctcccactgtcctgacttctcagccttcttttgaggcggccccgccccaagccagcacctgcccatgcagtcccatgggtggctccaagaagacactgaagaaggggagagttgaggtgatgcctcagggacctctgagcaagcacccaggcctctcctgccagcttcctcaactgacaaatggagctcacagaagattccatcacaattagatgagctagtgtatagacaagagctttacatggggctgtcactcagtgcttaagccgggtgtggtggttcatgcctgtaatccagcgctctgggaggccaggagtttgagagcagcctgggcaacatagtgagactctgtctcaaaaaaaatttaaaaatgtggggccgggcgcagtggctcacgcctgtaatcccagcactttggcaggccaaggcaggtggaccacctgaggtcaggagttcaagaccagcctgaccaacatggagaaaccctgtctctgctaaaaatgcaaaattagctgggagtggtggcgcatgcctgtaatctcagctactcaggaggctgaggcaggagaattgcttgaatctgggaggcggaggttgcggtgaacccagatggagccactgcactccagcttgggcaacaagagtgaaattccatctcaaaaaaaaaaaaaaaaaaaaatttggccgggcgtggtggctcacacctgtaatcctagcactttgagaagccaaggcaggcagattacctgaggtcaggagttcgagaccagcctggtcaacatggtgaaaccctgtctctactaaaaacacgaaaattagctgggcatggtggcacacgcctatagtcccagctacttggagggctgaggcaggagaatcgcttgaacctgggaggcggaggttgcagtgagctgagatcgcgccactgcactctagcctaggtgacagagtgagactctgtctcaaaaaaaaaaaaaaaagtgctttgcaagaactagaaaattaaaaaaaaaaaaaaagtacctctactaccccaacatagaaaaacgtactgatttataattcctactctctgacttgcgttaagcccctgaagcacttctgggttactatcccgcccccctggtcagagtctgagtcccacaaatagcccaggcaaaacagggctcagggcacgattccctgcccgccccgtcccagccatgcgtgaactacaaaccccagaaggcaacgcgcaccacgtccgtctcacctgacccagaggcaccgcgagcggcacagctcgctccatctccagaactacaagtcccagagtgctccgcgcgcgacgcaacctcacgaggccttacgtgcctagagcggttcctctccgtggcgccctaccgccttcggcgcgaaggtggctggtgcgtaccgtcccgaaccctaggagccgaggtgagcgccgcgaagacccccgacattaagaagtggtgtccaccgcagcccccttaagccggataccctcccccaccccgaggagcaagcctgccttccgccacgcgccgcccgtcttccgcgcccgcgcagaacctcgcggctgtgcccgcctaaagccacgcccatcctctcttggccacgccctcagagactcctcccctgtcgcccagatcccacccgcaggaccccaaaacccaatgatcctgcagcagcccttgcagcgaggcccccagggaggggcccagcgcctcccgcgggccgccttgggggtgacttggggcctggacgccaggtgcgtgtaggggaccagggtgggcctgaccaagggccgcaggagctttggctgggtgctcaggactggtctgcaggatgaatacggggtggggcgaatcggcggggcttaggcgtgagctgagatgggactggggctgcggctgagggtcgagacttccgaggtaccctgctggatggtccaggagagcggggaccggcaccagctgagacaggaatgggcttggggctcctggctgatgctgcaggcttaggcgggcagatccttgggaaggggccaagagggtggggtgcaccaggctctctttttttcccagctcccctctccgaggagctgtgcccatgagcaccaagcggcgcctggaggaggagcagtgagtttgggggcagggagggactcccaacaagatctctgtcacctctggtccccaacaggctgcctcctgtgtcagtatcccagcctgcctctctgccatctctccccagggagcctctgcgcaagcagtttctgtctgaggagaacatggccacccacttctctcaactcagcctgcacaatgaccacccctactgcagcccccccatgaccttctccccagccctgcccccactcaggtaggttcctccactggccaggccttctgcagaatcacaggcggtcctcacagctgacctcaggccctgcctcatcgtgccatttttagctctagctgacctctgggttgtttcccatcttggctctttggaaagtgctgggaacccaggagcccctggggacctggacctggtgggaggtgctcagctaggccagcctcagctccatgccctgacagtcatttcctcttctaggagcccttgctctgagctgcttctctggcgctatcctggcagcctcatccctgaggccctccgtctgctgaggctgggggacacccccagtcccccctaccctgcaaccccagctggggacataatggagctctgagtgctggtggacagtgcccctcccaccttccttcttccccacaacagaagagaccagcgactcccgcaaagggacaaggttcctccctctcctgcagagtaggcatctgggcaccaagaccttccctcaacagaggacactgagcccaacggagttctgggatgggaggggtgggagcatgggaagggaggcatcccacccccaagaagaactgaataaagattgctgagcaaaggaag

SEQ ID NO: 741 - DNA, 246 bp, Homo sapiens
gtccatgccctctggactctaagctgcttgaagcagtgaacttggtggtctcacgtgccgctgacagcagaccccagaacaagtggagctcaggaaatgtgggaggattgatagcagtgtgggtggatagacttagagatattgtgtccaggccacaaggcatcagcagagccgagcatcagccaggacaatctgaccctgaacctgacaacttaatcctgaagctgtgttgcctctgcagtattc

SEQ ID NO: 742 - DNA, 2038 bp, Homo sapiens
tttaaagttaaagattcttttattaataaattctccctcccctccaaactctccccaaaataaatatctcctccccgctttggggagttgggggggtctgtatcttagggccagccctcctagtgggccagccccctagtgttaaaaataggtccctaaccccccagggtgacccccgtggtggaatttcaggacatctgagtgagtggggcctagtgtcaagtctgccccccaagtcagcctggcccccagggcctctaggaaggagggcacccccctcccctgtgcaaatgctgcagttccttagtcagtgtcagctgttttgtgtgagccagcgtgaggctccctttctgttctggagccagaggcagggcaaccagacaccttggaaggttcccctgaaccctgggcccaggcctcagaggtgattcaccgccccccaccccccttgtggttggaggagcttggctcccgccgcgtctgggaggcagagactggctctagaatggatgaatgaatgatgagtgggcgagccccggctggcagggggcacattgtcactggatcagcgccacagctgggcagccctctccgccggtctcctctatgggggctgcaagataagaggtggggtcgtcagcagcagagaaaaggtcgagtgctgacagggctgggcaggccagggcacacttactggtgaacttctctctcctgcggcatcgtctccagaccaaaaagccagaaagcagccccagcacgaaggtcaggctcagagcgcccccaaggatgggccaaagcagccggaagggggcaggaggtgctgcagcgcctgggggcgggactcggagtcagacctcgcccctctccaggccagccccgccccctaagactgagccttctgccttctcccaaacgtggcctcctccctgaccggagccccctcccagctcccacctcctcccgattgatttcccagatgcaaagctctcggccccgctctgcgcaccagccaccctccctcccagtctggggtccgctggccactggccctgccccccactcacagcccaggcagaagtcgctgtgcggtcgcgccctgcaagacgcgcagtccatgcacttgtccaggtccgcgctccaggagctgccgcgggagcagggggcggtgcctggggagggggcctcgggtcagaggctgggggcgggactcggctattctggggtctgaggtcagggtcggccggctcgaataacgtgagtcaccggcgccctccccgcgcattcctcacaggtgaccgcacggcccgaccgggacacggcagctccgggagggagggcgtagcgcgggacgctgggggtggggggggtcaggtccccacaacccccctgccgccggcgggtgactcactcctgggcaccgggcccgaccccagtccctccccccgcatagctgggcactgaagtcaccggatggaagggggcaccccacatggtatagagggcacagaccctagtgcctctcgacggcctccccaactcgtcgatcactggggctagttagaccctgtacggaccaggctgggggcgtgccccttcctagactaaacatcccgccctcactcactttctctctccattcgaagtacttcggacttgtggaactgaagacccccccaaccccaattggacggtgggagaaactgaggcccggattgtgaatgaagcttggagagtgatggaacttcccacagccgggagcgagctgtttgaaggccacctgaccccagatccccacatccgcctgttcccccagttcggcgctgttctccagacacccagtccggctcccgagccccggcccggggttccccgaccccggagtcccgcgtacctggcgcttgctccccggccacggagcgcagcaacgccagccagagccccagcacgaggagccgcagcaaccggcgcagcgagccccgagccatagtgcacgtcctgcgcccgccgctgtctgcgcccgccgccggccggcagggac

SEQ ID NO: 743 - DNA, 1794 bp, Homo sapiens
ctgccttctcctgtaagtgctcccccagaacgtggcaaggcaggcgtcttcctatccgtgtgtgtctgagttgtgtggtgggcagatggggctcacccccaaaaaaggacccttatctgtgaatcaagaggcaaaagacacatcacaaatgtgccaaagaatcgtgcctcacttttgccttgttacaaaagtatgcttgctcctgaaagacagcatctcatttcggaaccccaggatttaaacggagcattccgtctccatgatcagtaccaaatgtttgtgaaatacacttatgcattcatgtggttgtttattcattcagcaaacagaatgaatacactctgttaaacagaatttagcagaaaccgctctggggaaggcactctgtggggtcctgtggatacaagataaaggaggtaccagcccccatcctcaagggtggcgtggccgaggtgcagaggcagttgggtgacaaacgatggcagtacaaagagaaggcatgaggcagtgagtggcaagaaacacatgccctggggccagatgtctgggtgtgaatcgggctctgctgctcattagctgcgtggcttctctcaggcaagctgcttgacgtctctgaaccccagcaatctcatctgcaaaagacagagggatgcatttcttcacacaactatgtctgggtcgccactgtttaccaggtactgtcctaggctgtggggatacagacctcacatctctgcctggggaactcaatggggggctgggggcagtaaagaataaatgagagagatctcatttattagtatgtgcagattgcaagtgctgaggaagcaataaagcaggaagggaactaggagagagaatggggtggaggaggctatcatttttggttcctcccaccccccagagatcacagatccgcagggacggagtgagccaggacgatatcagcacacagagggctcaagaaggtaatgctggcacccacagcacctgtgtgaggattgaatgtctcagtatgtagaacgtctttgcaacatagcaagctggcagtgcatcttggcagctttcaatcaaataattgtgactttgtttggtgttgcctaacagggtagcatgtaggttccttggggtagggcagggttctgtttcactaatgtgtgcccctggtgcctgccattaagttgacgcctggtacattcttgtgggtgaattatgagcggctgcagtggtagcacgggatgcgtgtgcagctcttccccaggagagtcagacagggtttttagggttggggacagtggacctgtggctttaaaggataaataggagtttgccagctggagaagagggaagggagaatgattaatgaccccaggcatagtggggtgcctgaaactgtattgagacaaatctgggcctccagggctcatattctccatgttcggcacatgctcgtggcgggagacaggaggacttcgagaagtggaaagagtagtagagtgacatgatgaggcgcttggagaagggaaagctcatgtgagatggtgtagtcacctaaggcttcctggaggaggtggagaccttgactggatcttggggaaggattaggaattaggaggaggaaggaaattcctggaagaaggctcagcatgagccgaggctcacaggcagaagtggtgcatctaagagctgcttgggagaccagacctggccagaggggaggcattgaggaggggtgagagactcttctcagattttattgactcctccatgctcttctctggtgcaacaggatga

SEQ ID NO: 744 - DNA, 118 bp, Homo sapiens
gccaggcacggtggctcatgcctgtaatcccagcactttgggaggccgaggcgggtggatcacctgaggtcaggagttcaagaccagcctgaccaacatggtgaaaccccatctctac

SEQ ID NO: 745 - DNA, 537 bp, Homo sapiens
aaaaaatcccattaccacttaagtcaggatgtggggacatcatttgtcctgcctggttcctggacttggtgttttgcctggactgtcttcgatgctaccttatgcagtgcctctcaggcctcatctctgcctactcattctgcatattggcagccctcgtgtcctttctcctggtgtccttgttactgcccccattacaatcagccatgtgaacaaccccaatatcaccatgaccatcaatacctggtaaatcctacagttacagttataagttcccattgaaaagaagttgagctctcttaatcagtttagagaaatatgatcacacttttgaaataacagatggttttcatctcatttgtcaactttgatcgattgacaatggctgcttgaagtgctgcatcaagaagaattctggcacacctgtgaggatggctactatcaaagcagaaaataacaagtgttggtgaggaggtggagaaattgcaacccttgtaactgtacattgctggtggaagtgtgaaatggttgcagcct

SEQ ID NO: 746 - DNA, 564 bp, Homo sapiens
ataaaaaataaatttgtctcccatctcatctcctaataccgaattcccgttccacagaagggagtacttaatgtgtctgtacttaatgtgtctactttgagtaatatttcatctacatacaagcagatattgtatgtttagtgtacatatatttaatttctcctcttttacaaaaatggtagcacgcaatacccattgctttctatttttttttatttaacaatatcttggcaatctttctgtatcagtatataaagtgctattctctttttaaaaaaaaaaagctgtatggatcttctataatttgtgtaaccactaccatattgatagacattttacttttcgatttcactaggcatgcctggcccatattgctctacaggttgtgcattgcacaagtccaagcagtgtcattcacatggaccacagtgttaatagtattccaagtcatgcttggaaccctgcacttggggaaatatcaaaaactttaatcattcaaaccatggattcacaggcaatagagaagtaaaggacagagaaaggaaaccagaggaaggaaaagga

SEQ ID NO: 747 - DNA, 672 bp, Homo sapiens
gatctgatggttttatgaggggcttttcccccttttgcttggcacctctccttcctgccatcatgtgaagaaggatgtgtttgcttccccttctgccaagattgtaagtttcctgaggcctccccagacatgtggaactgtaagtcaattaaacttctttcctttataaattacccactctcgggcagtcctttatagaagcatgagaacggactaatacatatattcatgttcatagcatatattcatagtagccaaaaggtggaaacaacccaagtgtccggcaatggatgaatggataaaaaggaaattctgacacatgctgcaacacagatgaaccttgaagacattcagagacataagccagtcacaaaaaagcaaatactgtatgattccatttctatgaagtatctagcgtagtcaaatttatagagacagaaagtggaactttggttgacagaggctgggggaaaagaggaaatggagaattagtgtttaataggtttcagctggggaagatgaaaacattctggagctggctggtggtgatcattgcttaacaatgtaatgtacttaatgccatagtattgtacactaaaaatggttaaaataaattttatgtcatgtatattttaccacaataaaaacaataaaggcttttgagtgactgca

SEQ ID NO: 748 - DNA, 6234 bp, Homo sapiens
gggaaccctggcggggaggcctgcgcctcctcaagctccagtccctctggatgggtgagtccctccggtgcctttgtcctgtgtccaacttcctttgtcctctccagaggtctctcctgggcttcaccactggtcatggtcctccaaacagcagctcccaatccccaggacagttcttcaggacactaccccttcctcccaggagacccgcaggtttcagctctcctggggccactgctggaccaagtcctcaattgcttccttgccattatcctctttgaactccctctctctcctctaaaagcccctctggctgcagactccttaattgcgtggctgttcctttccagaagcaggtgcgcctgcctcgggcctcttcggactttccatcacaggccaaaggaaaaccagcgagagcttgcatgacaccgggtccgtattaagacaggcgcaaaacgatccttcctcttctgtgcgccttagggaacgcccgaaggcatgcaaggctggggctcaggggagggtccccgagcgggcagtcagggctgccctcaggccctgggcaaggaggtttccggaggcccctcagttctcgagtgtgtgtgtatgtttttggtggtggtaattgggaagcagggggtcaagacccaggagtgcagagagtgggagagaggatctcctccgcccatcctgggctcctgtcgggcctaacctccacccagcgtcaactttttgctgctcccgttagatggcgcccaagactttctaaccacttgtgaaagtgctcctggcccggaacaaaaagaaccgtggggtgtgagtatgagtgtgtgtgagtgcgagtgcgcgcgcggggctggccacagggcacaggagttgcctggcactacgcgtggccccgtcgcgggtcgggtcgggccggcccagggctggggcgcgctcacgggaggagctgcgcgcggccggcggagaactttcttcttttcccttcgctctccctcttgagcgagcgcctaggccctggccactctcccggagagaagccgggcgacccggccgcgggctcaagcagccagcgccggctgcaagtgaccgcggtgcgcgggcggaaaggggtcccggacgtgcgggtcggagagctgggacgcacacgacagcccctttctctgcccttacttaccggcccagcgctcacagccgctgccctgtttttaagagaatggcgcaggtgcaagtttggttgttgcggttttagccgctccaaggaaattgttcagtgtaaggttacctaagcgtactgcgtgggcgtgtttccagaaacaaagggcaaactttctcgctcccaaagccagtgaagttaaacagactcccttatgaaaaggcccttggggaccctagggcgtcagatgcgacagctaattttaaaataactgtttaacaggtgattagggagcgcgctttctctccaccaccaagttcacctcttctccaaacccctctaaaataagtgacttgacgataggtgatcccattccctagtcctctccttaatgccagtctggaggcgcactgtcaagaagggatgcgtctcctcgcccttgagaaccagcgcggagaccttcttttgtgcctctccttggctgtgaactttcccgcgcggtaggttctcctttaagaaagtagcatccctatgaatatttaatgctgcacgcgggccggcggggcggaggggagcccgcggcctgggtttccgcgcgcgccgagacccgggcgcagagcgagtgcgtccccaccagcctggccgccgcgggaactcggggaccgggagggcgggggttagcgggaggaaagggtaagctgaagaggggctgggaacgggagggaggctcggggcgaacgggccgtcgcgttcatttccataagaaagctgaaatcgcagttggaagcaggatttctcgcccctgcagcccttcccccatacccggttttctgcaagaagcgggctccagagctcagagcccgaagtgtgtgctctggtctttgatgatgttgataaaatgtggtttcaaatgttgtcccgaagaggccggtttcctgtctgtatgtggaatggaaggaccgtgccgggtgagtccagaacgccggggagcggacaggaggagcagggctgaggagagggagggcgcagccggcgggcgcagggcatccctgcaggggaagttctccagggggttttgaaagggggagccaggttgaagccaagtttcccgagcaaggaagagtgtgtgtgtgtgtgtgtctgtgtgtgtgtgttcgggggtggggagcgcgatgagggaagacgtcacgaaagccccagaacccaggcggcccgcgcgtgggaaggtctggcaggtcttgtcacctccctcttcaaagagcgggggaaactttcgctggccgtcgctgaccctcttcctgcgaaggaataaagtgaacttgcccagatactggattccactggcggttcagttgttgagttctttctgcgttcgcattgagcattgagtttctttttgacttgcagtgtgaacagcagccatgtgacctcaattctatatcacatatatatacacacacacctcctaggtactttatgatcccatctggagaaattaaagcccagatctgtaatgtttattcttagatagtttaccaaaagcaggggggaaatgtgtgagacacatgtctgcaaatataacaaaagtactttcccttatgcttgaaaagttgcctgcaaatggctggcttccgtttactgactgcaccacctgtacctctccatgaaactaaatggaatcaggaataaagcaccaatcagatcaagcaattaaataccaattatgactattaatgactttattactaatgactggagttgaggactccaaacccaaatgaggtaatcaagctgttttaaaattctgctacctaatatttttaccgcactccttccccaaaataggaggttaaaaaaaaacaggtaatgttttcaaagagttctccagtaggtattcatggtcaatgttgaacttatttttctcagaaagtttattgctactgctggtaaataatggagtcttcctttctggctctgccaagttacgcaaagtgtaactgatgatggtggttacacaatatatggtacttggtttggatgcagaattgggatggagcaggggtgctttctgtcttcaattactctgataatccggcagaccctagacgattttaaggaacaagtgttttaattcttcagatggggtaatggctattgggatgtttggaaggtgaggaaatgaagaatggggaacccaggcagcaaagagaaagaaggaattgggcctatgttttgaattttctttttgctcatgggttgaaatgcctttagcttgtcataagctaagtgactgaaaagaaaaggttactgagaacggtatattggtgtaaaggctactgtgtagctgggtttatttattactgaagatgatttgccaaccctccttgcctcttgattgacaccccttcttatcccaaatggaagtccctgttcattctgggataggaggaagaggcctggagggaggaagggaataaatttctgctgcagtccatgagaagaaaggagggggcagttagtagggattctttagtcaccatgaagcaggcaggctaggcagctgggcacttggaggagccagcagttcatcttgatgtaggtcatctctgctcattgtcccatagtttagctcttcaggacacaaggagtgtttggaacaatgaacttcaagtccctggcttgggatatttccccttcaccttcctcctaggtagaagcctacagcagcagcagcagcatctggttctgatgtgtttaccgggctggtatggaaatgcccaggctgcatggcagaaacctgagctgctagtgacaagcacactcctctgctaagcagcgaaaagttttgatactttttgagcactgggtggcctcttctcttgatgtgaagccatgagcccccctccccatttctatttgtcagagttaattgccctgcagtggggcagctcacacctcaggcagtgccaagaaatacagcagggaaggaatcctgcacatgtaacaggatggcgtggtattaccttagacacctaggggatcaaaaacctcagtggaatgaaatgggcctggggtattctccctttggtgcctccctagggacaagcctctttggcctggcctagactgtgggcagcttatgtatgatggccctgagtcctgaaggtgaagctagtcactttctgtaagtggacagtcgacccaagaggcagttctaaagaggagagcctgaggtgtccacaacaatttcttttctgttccagggcaccaagaggcaccctgagaactcagaggacccagaggctcccctcaagcaaattccctgctgaccctggacaccccttgaaggagggggcaagaggctgccacaaggctcatcttataactcccagcaaggactcccagcaaacaagttcagcttgggatctgcccaccaccaagcctggctgggaggtgggggggagcgaggggcggtggagaggcagagtccctgaacagggaaaagacaatcagttgttcccctttctggtgtcagaggcaaagaagcctgaagggctggtggtggtgctggctctgggtttattgactctgtgatcctgtccagctgtcctacagggagttccagagctctcccaaagtgcatgaggaactgcacaagtaggactggggcacaataccagaagctatttgtctcctagaacctggcaccccctccacttaccttacaggagacccacatcactcagttcccaggacacctggtgggagagtctggtgagatttggaggcagacttcctctactcacaacttgtttgaaaatggacataaagagaagaacagacactccatcgccccttcagggcctcctttgtgtcacaaaacctatcccctcctagggcacccttgacattcccctaggtgggcctacacattgttcagaacctgtcccctgtaccaaaataaatataaatgagtttgtttctttaaaagaaatattacagctttaaacttttcccagccggaatccacctaatttcatcaaggtctctcgctagcagccataacccaggccaaaagggcttgtccctagggaggcaccaaagggagaataccccaggcccatttcattccactgaggtttttgaacccctaggtgtctaaggtaataccaccaccatccccacctgttttcagttctttctttgtggcttaagattgcatttttggagggtttatgtaatgttgttcacgtcagcaagtctccctgccccaccctcaccccactgtcctatatggaattatagttggaaaccacacacacatagaaaatctttgaagatttttttctgctattcttcctgactagaagagttgacaagacatagacacattcagttgcataaaatacagtagcgtgatcagcctaaatgcatctcatttgcactgtttgtaaccaggggtgggggcttgtgtcactcattgcctccccctcctctgcccaaaccagacccgccagctggaatttcagagcaggccccaaggcagcagccatttgggaagtggaagccctagcccaccccagtccagcaggggtgcggggtggatagagaaggtgtctggaggtctggcctgagggcttggaccaactttggcagacctgggctctgggaggcttggccggtgggtgaccacagctggaagttggaggtctgcagcgatgcttctgagcttctcctgagttgagttcaagaaaggggacaccaagaagtaggggaacagtcactgactatattttacatccacgcctacccctttcccagagttgtgttctcaccacccactttgtcggcggaggagaaacactgctgcctgatgcttgcactgctgcactgttcttgcacctgctcctagccctgaactcgggccctgagctcctcactgccgccccctctgcgctgagccccactcctgagaccgcgaggtgccagagcagcgcctctcccaccaactcctagacgcctgtaggacgtgcgccggagccttcagaacccatgggggtgtgggggtgaagttg

SEQ ID NO: 749 - DNA, 2091 bp, Homo sapiens
agcccgggggaacagtcagcgggctctgcgtcccgggagctggggacacgcctgcaaggtgtgtgatcctttaaagatccttagtactagttttgtagggagcctttgttatagctttgtcagcctgcgcgccttcagcagctccccctcccgggcccctcggttccctccgggctcgcccccagcggagagggcccggcgcaggggatctgcccaggatcaactgccctcttccagatccccttctgcgagattcttttcctttggttacaatctcccctccgtgcctggggcagataaacacggttcgccccgcctgcagtattggggcgatgctgtcctggaagaacgggctttctgaatgtgacctcgggatgctgcagcggcgcaatgctgctactgctgaatgagtagctctcctgccaccgcagggcgactgcggtgggcacagcagggcgcacagaggagggggtaatctgcccacccaggctaaggatttgagggttctgacaaaaaagagctggttgaggatgacacagttgtgaactaacctggctcctactaccccacagggcagccaggtcccagtagtcttgggtaccactgcccccaccataccaccattgtaaagtatggactcctgcttagccaacgtgcagctctaggcaggatctctgaaggatgctctggcacacagatggtgcaggtatgactttacctgcacacaagcttacatgtgccctgtcatatatggctacacgtttccccatttccccacagtcttcctatttaactggtcttcaatcctcctttctagggctttccgcctgcacacagtcatttggagaaaatcaagtgagtgcacttctccccacagaggattctgtatgttatgtaacacactcacactgggattcctcaagttaccattttgccccaactcagccagcacttggttttctggcgggggtgtcaggatgatgcaaatggaggtggaagcttcattccctgggggcttttattcccctccttgaagccccagttcaaggcccaggaacaaaggggaaaggtaactgatctctcttttggtctttctctcccctcacttccaccccttcacctgcaggccctcctctttgataaatagaggaaagcccgtgggatcaggtacatatgtaaatactgctgacctcggccgcccctcctcaccgaaaagcagaaagcccgtttcaggtgcaggctgctccgtgcctttgagtgtccaccacttctattcccccagactgcttgggactcaaggccactcacttaatacccgtctcttgttaaaaacattcaggacaactattaaatagttattggaagagttaaagaccttctttcaggagtgaaacgtttttaaagctgtgcttggcataagtctttaaggcgtacaaagtagaatcagtagacttgcctgagcgattttgaaatttgaaagatttctccccatgaaatggtaatttaaaatagtttgtagatgttgttttgttctgtgatggctttttcaccattgtcacctaaagattctcaagaccaagctactaagacatttcatttggttagtttctgggtgatactgtgctttctgattagacctatttaatttatttttaactctgcaggagagttttcaaccttggaaatgtaagtgaaacacagactcaccctccttctgagaccttgataggggcagaaaggaacaaatctggctagcccccctcacacctggaagtttccctgtctaaacctgggtacaatgagcgtggtgggttttgtcaccttttattttattgctggctcaaggaaaattctttgaaatgaacatctattctatttcagtgtgcaatgttccagccgacttaatgggcttgccttatgcggagaggcagtcctgcaggacagagctaatgtgtggtctcccaggaagctcatcagaacacctcttgtcccttttctttaaaagaaaaaaaatttaaaaagtttttgcttccatctcaatgtccattccattattttgtagctacaataaagaaacatgggcagcagtga

SEQ ID NO: 750 - DNA, 140 bp, Homo sapiens
aaaagaggctgggcatggtggctcatgcctgtaatcccagcactttgggaggctgaggtgggcggatcacctgaggtcaggagttcctgaccagcctggccaacatggtgaaaccctgtctctactaaaaatacaaaaaa

SEQ ID NO: 751 - DNA, 4416 bp, Homo sapiens
caattgcagaacttcctccgttgccaaaataacaagaccaactacaatttggtatgtgagaccctgcagtttctggactgtatttgtggaagcacaactggaggccttggtcttctgggcttgtatataaatgaaaagaatgtagcgcttatcaaccaaaccctggaaagtctgaccgaatactgtcaaggaccttgccatgagaaccaggtaattaaatttctgttttgggatggggaaaaaaagtgtcccattttggaaatgttgatagagactagttcagaaatcacgaagcctgtgcctgttggcctagggagtcagtaggacaggaggctgtcttccagcagttgagaaatagccatggtgtttcatgatacttcagaaccttcctaatgaaggacattggagggacagtccatggtctctttccttggctaggtttggcttcatttgatttggtttgaatgtccaactatttaacttgatttctaggagtaggcaataaggcaggagtgaaatgagaaccaaaagacagtgacctattttaaatactaggggatttcaaagagtgactactggaagggggtttaagcctagctagagagaagaaaattactacacgtgagacagcttgaaagtaatataaggacatttttatagttgagatttaaacatcatggacattcaggggaaagaaagatgagatagtcttgactttggtctctcaaagaagaatattttgggagtacaacccaataacttcttgtcttgagtagagtcattgcttatacatggcatcttaaggattttgtgagtttttgcattgtgctaggttgagtatgatgttttgtttgtttgtttttggagacggagtctcactctgttgcccaggctggagtgcagtggtgcaatctcggctcactgcctcctggattcaagcgattcttctgcctcagcctccctagtagctgggactacaggtgcatgccatcatgcctggctaatttttgtatttttttagtagagatggggtttcaccatattggccaggctggtcttgaacttctgacctcgtgatccacccacctcggcttgccaaagtgctgggattacaggcttgagccaccgcgcccagccaagtatgttttttaataccaaattatagcttcatcctaactggagagagacgaccaaggcttcaaatggtcagtgctaaacccagcagccagggaaggttacttgtgtgacttggggagccaggcccttcattcagaggagaacggtttatgagagacaactcattgtctattaaaaacctggtctcagttgtctgtgaatgtgagaatagcattttgtgagatgcactttcttctcccggttccctcatgaagcagatggtgtagtcctagttaaaatgaaaaggaacaaaaaaaatacaacaggcttggggaaaggctttatttgacatctaagtgaatttccttattacctcaagtttgcttctctgccaaataggggcctgttgaaaggaacagatcagagtggattgtgctgcaaacggagatgttacctgggggcagatgattaattttgatattgtgtgccttaaacaggaaacttgctttccaagcttaagccttaagctaaagtacaaaatacaaaaagagtgctttagagagaatggaacacaccttgaaaggggaaaaagggttcagaacccagaatcagtcatacaccatattttcccttaagaacaaaagccaactgtgctgcatgatttggattagacacaaccaatttatcagttacagtgcatggggactttcctactgtttactgttaattctgaaactagagattttcatctgtcttttattcttaccactttctcacggaaaatttgcagctctcccctagagacattactgggagtggtaagcattgtgttgaaatagcagttcagcctgttggcctttgacgtctgatttatgaccagcgtttgtgtgaatgtctgtgtgtgtctttgctcagaactgcatagccacccatgaatccaatggcattgacatcatcacagccctgatcctcaatgatatcaatcctttgggaaagaagaggatggaccttgtgttagaactgaaggcaagtaggaattaaaagcagaagacagtcatttggaaacagtcacttttgtgttttgccttggcacatgcacatgggcaattagtcatgagagtaaatattaaagatagttctttaaatgaatgacccaggttgctagtgctgactacgatgcagaactccaacctttctcttccacgtaaggtatctcatgaggggataggagcttctgaactgttaggtcacacagaatgaagattccttgctccaagctaagaagtgaatcccaacagcatcgagtactaaataccttggttctgaaagtcacaaagagagaaacagtggaaacgccattccctctctggtttctgatttttccccatttgagggaaaagggccggttgaagaatagtacaactaagcctatctaggaccaaaaaaaaaaaacccaaaaaaacaaacatgtatttttacttaatcaaggaaatacctttttctcttttgtcactgatttagcagaagggtggttaataatgttggtttaaaataaggaaaattacacaaaccaaaaatgtgcctgcgggcctctgctgagtttctctgtattgtgtacaaatgcgggactgcaggtgactgatgtggaagccccactgacatttggactctctattactcaaacagcttaacggaatgaaaatcgtgacttctaggtgctaaacctgcagcatttccaagctggccttttttggatatttgagaaattgatataccattcctgatgttgacttctaaagtatacccagaaaaccctcccttctatgtaggggttccataggttctctgagaatcccatgattcagttttaacaattgagcttgcaggcatcaggtttctaaagtatatttcaaaacatgttagcctttctggacacatttcctttttaactgttcccatgtcagggcatgttgagatttgtcctctatctgcccatccgcagcagcgagcacttcatcattatcatgaaagagcctagaactacagggttttggctgaaaggttgagctgtatttattgcatgaaggatgtcataggaaaggtcattaggaaagatgggaacacagaaacctgtgggaatggcagttattttttctttactatttagaactgagagtccacactaacagtcgatttgggtgtgtggtttaaatggactttttttctgctatttttaattccttttgacaaattgtgttttagagtgaattttaacagattcaaccttgtgtacctggccaccatttatcagaaagtccgaaataaacagaagttcatgtgctcctggtcagcatttgagtgactttttcaactaatccagtgatctatggatgatgatagaaatttgtgccctgcgatagcatgataccctgactcaactgctgtgacctaaactaggggaagaaataagaccactctcactgtccaaaaaaagaaaaaaaacccaacagctttcaagtcctgtacataaagaagcatacaaagtatcatagacccagggcctaaaatgaagtcaagccaggaagtacaggatgtggggtgtgaacatgggtgtttttaatgtaatgggaaattagggcttggcctgcatacattgttcctttgggtcacatttgttaactagtgtcagatgtactcattatattaggggttatgagagctaatagaaatattttaagacagggaagaattacctttattacctgtcttctctggcctgcaaggccaaataacagtttgtaaccacacctgcccggaaggcagcacagatctgtgtagtagcagcttcttcccaaccactgtcaccatgagggtgacagtgtatccgtaagcacccacgtgtaaattcccaatttcttctaggacttgtaccagctaacattagggcataacacacatgccctgacaaatatgtgcctctttgtccgaaatcagattctgcacacgtatctggggtctgaagggggatgctctctgcctggtgcagatggattttgatgtccttaacccagagcttcctcatggggtgaaatgttcgtctgtttagccgggatgcctcccatgtgccagttggcacctgcattcaggccgggcccccaagcagcccctctacatttcctctccctttgtttctccaactagaacaatgcctcgaagttgctcctggccatcatggaaagcaggcacgacagtgaaaacgcagagaggatactttataacatgaggcccaaggaactggtg

SEQ ID NO: 752 - DNA, 4416 bp, Homo sapiens; identical to SEQ ID NO: 751

SEQ ID NO: 753 - DNA, 4416 bp, Homo sapiens; identical to SEQ ID NO: 751

SEQ ID NO: 754 - DNA, 382 bp, Homo sapiens
ttaatcttttcctattgcccattttttttacagtaagcatgtcgctttggtaactgaggaaaagaacatacataattaatttttgcttctttttaagaacagatgactggagcctctgacaaaaatctcctcattaaaatactctatttctcaagttgggtgaatgtggctttttaaattttgttgaggaagtgtcttgctcctatctgtgcctcttgtttacatttagaactcacctggagaacacctgctcaggcacatgcacacaagcacacacacatttactcactgtcactccttcctttaatcgtggaaatggccaaacaagtaatccaggctcctgccacatggcactgggagtaagccagctgatcacaccccc

SEQ ID NO: 755 - DNA, 382 bp, Homo sapiens; identical to SEQ ID NO: 754

SEQ ID NO: 756 - DNA, 382 bp, Homo sapiens; identical to SEQ ID NO: 754

SEQ ID NO: 757 - DNA, 31853 bp, Homo sapiens
atcagttcttgaacctgtgttgatgtttattctgccactgagaggtacaccagggtttccaaagacagtaggaatatttctgttctctgtgtatattgaacagctgtgcacctaagcagggtgcctgagtaggaagttaatttcattttaagggctggagcttgttacaagtagcggagccaagcctttgcacatccattttcttcagaacccaaggaaaactagcccatcttgacagctctacttttgcgcctgttagtgctgccctgatccctgacaggaagagctggctaattttagataatctgtgccctgacactgaagtgtctaatcataggggctatagaaacaactacattaacaagtcgtccagcctcatgcccaatgtcacaatttttgaacagatggcctccttccttcctgtttactgacatgcaaggctctgagaaaaataattcaatccaatttacagcaaacaccacatttcaagaaaagggaaagaacaggtgatgtgtataccaaggtcccacttgctcaggcaaaaagaggctgcagaaaattggttcatcaatggaattctatcacaaagtgaccattgtatagtgagtttatttgtgctctaaaatagtatcaacgtgcatctttccactgaatgacttcatggatcgtggccaacatagaacttggataggaaatcctttggccttggcgcttctgtttcatggaagaaccgcataacatgtgtccgctgcttccatactttaattgtttcttccagttcgatctttccctgaacagtgaggagagaggtcatcagtcaaagttgtcaagttgaaggcatatgacactgaaggccaggattctattctctgctcagcatggacttgttgaatgaccttgggcaagtaactactctgtctgggcaaagtttctatgtctggacaatgaggtggtcagggtaaatcatttctgacacttttcagattctttaactctgtggttaactggtaccaagaggagaaacatacaggttaacaggctcctatcccatgactacctaacctgactggcttaacttatgtttctgcttatcatttcttctgttactgactggtctatgctgaagctcccattgatgctaacgtgactggccagggggacagaatcagccccaggatttgagtccatttatacaggactcataaccaccctaactgcctcttccagctgtaaactggcattcagatgaagtggtaacttctagggatgaggttcaagaagagttcaaactttcctccctatatctttttttatggttataaaatgcaagtcccagtggatgttcccttgatgaatcttatctatttaaccagatgataacctccaagttcaagtatttctctgaaacacagcaataatcactgccgaaccagtagctgctttctaaacttggagacaaaatgttcatttggaaagactaagaagtagtggacaagttggctgatcttttaaattggtcagggagggtcagttaccttaatgaccagaagatcaaccaccctggggtctgtgacatgggcattcttcataaacatttctcggactttatcccgtcccattttcacagtgatgtccagctggaattggtgcactagagagaaaaacatgactcagggtagaaattgtatggttaaataaaacctagagtcaaatgatactcattgaacacatacaggtcgcccattcatttcttcaccaaaaaattagcctgaccctaggctaggtgcttgaggatgagacatgtgattcatggtatttgctctcaaggaacttattatttgtttggggaaaaagaccactgaatttgaagaggcagtaaagcattgttcaagagtttgaacaacctgggttcaaatcccagcttttgttagctatatgatcccgtgtaagttaactttcttgtgcctgagtgtattttttaaaaaattattttatgggctgggcgcggtggctcacgcctgtaatcccagcactttgggaggccgaggtgggcggatcatgaggtcaggagatcgagactaccctggctaacacagtgaaaccccgtctctactaaaaatacaaaaaattagccgggtgtggtggtgggtgcctgtaattccagctactcgggaggctgaggcaggagaatggtgtgaacccgggaggtggaccttgcagtgagccgaggtcgcaccactgcactccagcctgggtgacagagcgagactccgtctcaaaaaaaataataattattttattagctgggcgcggtggctcacgcctgtaatcccagcactttgggaggccaaggcaggtggatcacctgaggtcaggagttcaagaccagcctggccaacatggtgaaaccccgtctccactaaaaatacaaacatgagccgggcatggtggtgggtgcctgtaatcccagctactcgggagactgaggcaggagaatcacttgaacccgggaggtggagggtgcagtgagctgagatgggccactgcattccagcctgggtgacagagtgagactgtgtctcaaaaaaaaaaaaaaaaaaaggctgggcgcggtggctcacgcctgtaatcccagcactttgggaggccgaggcgggtggatcatgaggtcaggagatcgagaccatcctggctaacaaggtgaaaccccgtctctactaaaaatacaaaaaattagccgggcgcggtggcgggcgcctgtagtcccagctactcaggaggctgaggcaggagaatggcgtgaacccgggaagcggagcttgcagtgagccgagattgcgccactgcagtccgcagtccggcctgggcgacagagcgagactccgtctcaaaaaaaataattattattttattagctgggcgcggtggctcacgcctgtaatcccagcactttgggaggccaaggcaggtggatcacctgaggtcaggagttcaagacagcctggccaacatggtgaaaccccgtttctactaaaaatacaaaagttagccaggtgtggtggcacgcaactataatcccagctactcgggaggctgaggcatggggaaatcacttgaacccgggaggtggaggttgcagtgagccaagatcgcgccattgccctccagcctgggagacaagagcgagactctgtctcaaaaaaaaaaaaaaaaaaaaaagtgagttatcattactgtttttttcattaaatacttaaaattttacttttgttttttattaatgctcaggctgttctaagttctcaacactattacttattccccttccttgatttgattcctcagctggagtcctgatgatggataccataaaacccgtgtggcacaggtttgagtaactggccagctacagatcactgatcttccccatagggatgcatactccttgaccccttcttttctctcctcttcccttgctttctaggctcctgtagccctctgccttcttttcctcctctcaagacccttctgactttgggactttcttcccaaaacagaatttgagggaaggtcttgggaggggtcggtttagaaagagctggatcctcagagtcaggatacctgggttctgtcttctacttggccactgatttacccttcacaagccaccctttttgaatgtggtcctccttcccccagcaccttcctcctgcaaccagagagggttctgggtactcctagaagtattctgccaggcaaacattatgttttcaaactgctgaatttgaatgcaccaccccgaaacacacacacacacacacacacacacactgctacagtcactccccacacacatcttttatctgcctgcccctgaaggcatctgaatttgcagtccctgaaccagcagatcactcaagtttctccttctctagtatcgcgtgggtttaagttctggtcagtagcaatttttccaaaagtcagcttgaagacagggactctgtggagcagacacagttctcatatgtcaaagaaccgggttctgcttggaagctgctgctaaggaaagccctataaataacaaaaataacaacaaaaacaacggcagcagctaatatttaatgagttaaatatgcatcaagtcctgttctaagcactctagatattttaacttaatacagtaaccttctgaagaaggaattattattcccattttaaagatgaagaaactgaggaatagatgaaataactggcccaaggtcacacagctagttgagggcagcgcctgaagaaaagtccgtgctcctaaccaccacattctaccgccttttcacacacacaagcagggactcgacagccctgaggagtggcaccgtgctccagctcactcaaaaacacctctttctcgcactttgggaggccgagacgggcggatcacgaggtcaggagatcgagaccattctggctaacacggtgaaatcccgtctctactaaaaatacaaaaaaaaatggccggcgtggtggcgggcgcctgtaatcccagctattcgggaggctgaggctgaggcaggagaatgacgtgaatccgggaggcggagcttgcagtgagccgagatcgcaccactgcactccagcctgagcgacacagcgagactctgtcacaaacaaaaaaatccaacgggcatctataattacactctgcaactctagactttgggttctgggtacaacagtggctcggcctgggccctgggcacatcacttcacctctcggtgcctccgctgcctcacccacaaagtgagtgtgtcactgacagtcatcgtcctcccgccaattgcgaaggacaaaagagaccaaagctccgatagcacgtacgaatgctaggcacggccggtctgaccaccgcgccgccgccaggtccggcccatggtaggctcgggtgaccctcttcccctgaagcacccgcagtcgcctctgcccaagttggtgacctcagctgggcccatgagaaaccccggccgggccggctacgaccttgagcggcggcctccgggtccccacgtaagccgctacctctcaccagtgttcggcacctcccgataccaggcgcggtagagctcgcgcaccctccgcttggcctcgttcatgtcccgactgaaaatgggcttcacgaaggtgctggcggtagaagtagcttggcggacgccgctccccgccatcttgccaaagcatccactccacaaccccacccctttgcaagcagcgcgtgcggaccgcgggcgaatgtcttttcccattggctaaggaggaacgccccgcctgtatgctgggtgggcgggaggatgactctgaggctctcggattggctgggaagcctctctctggctgagcgaacggtgggtgctgcgcatgctcatctacagaaacgccgcttggcctttggactacaccatctgtcgctcgctctaacgagccggcgttgccgccaggggacgctcgggccgcaggaggtcgctgggtcgtgagctggcgccggggacgccgagcgactgcggggtttccctcagcgtcctgctatccggctgcccgccgcgctccttggtagtgtccgtgggcgcgcaggccttgaagaacctcctcgtggcgggaccccgaggtaactgctgaggcagataatggcgcctgggctgcggtggggcttgtcctgccgcctggcggctttctgcagggccaggatatacttacttttctgtaaaccaactcttccttagcgcaggagaggtgtcaaagagctggcgcgtctccagagccccgggaggaaggctgtaacggcagccccatcgtagacagggacattcgcatcccgagccctggatctctgaaaaccagcccagaatttggaagctggaaggaactttagatcgtccattctgagtgtctctcttcgctggcgttttcccactgaggttatgtaaacatgaagaggagcctacaagtgtcaaggaaaaaacgacagctaaccacagggcaggccatgggcaagatatctcagtgttctccgctctcataggtcaggtaggtacctcagcatccccattttacaggtgaggaaactgagatggcccagagtctaggtcacctgacagatcgcccccacctgcctgactgctgcctaagaggctccgtctttttctgaaggtgtagttgacaggagcctgtgagtattggggaagggccaggggccggggctgagcatctactccaaactttcccatttcgaagggttaaaaaaccagatatactttttttcttccttattatcttctaaaatgtatatatatattcaagtgagctatacaaaagaaagcacgtaacatatataaattataaagcataataataaaatggaagcttttgaacctcagtactgacttaagaagttgtaacacagttaaggtttgtataaagtgtccttagatgtccttagtagccactgttctctagttctctaggtacattaacttggctaggcttcacaacacaccagtgagattgtgttgatatacccttttttttttttttttttgagacagagtgagactcacctaggctggactgcaatggtgcaatctcggctcactgcaacctccgcctctcatgttcaagccattctcctgcctcagctttccgaatcgctgggattacaggtgcgcaccaccatgcatggctaatgcttgtattttagtagagacggggttttgctatgttggccaggctggtctcaaactcctgacttcaggtgatccacccacctcagcctcccaaagtgctgggattacaggtgtgagccactgcccccggctgatatactcattttatagatgagaaaactgaggcacaaagagactaagttactttacagcattggggttgaagcccaggcagctggtgccagagtcagttttctgactctcgcagcacctataccatgatatctacctgtatgattctaaccttgtgtatacccctgcctccttcagaagtacccactatcatgataaattcattgtgttcaacattcaaaaaaaaaatggggcgcagtggctcactcctgtaatcccaacactttgggaggccaaggcaggtgtatcacctgatgtcaggagttcgagaccagcctggccaacatggtgaaacccccgtctctactaaaaatacaaaaattagccggcatggtggtgggcacctgtaatctcagctactcgggaggctgaggcaggaggatcgcttgagcccgcgaggtggaggttgcggtgagccaagattgcgccgctggactccagtctgggcgacagagtgagaccctgtctcaaaaggaaaagaaaaaaaagacctctaaacaacccacaaactgggagaaaatttttgcaaatcacatgttccataagggacttgtatctaggatacataaaattcttacaactcagtaatgaaaagacaaatagccaagtttagaaatgggcaagggagacaacaccaaatgctggtgaggatgtgaagcaacaggaactctccttactggtaggaacgcaaaatggtacagcagctttggaagacagtttggctttctgacaaaactaaacatactcccatcagaagatccagccattgcattccttagtgtttacccaaatgagctgaaaacttatgtccacacagaaacctgcacatggatgtttacagcagcttttgtttttgtttttgtttttgagatggagtctcgctctgtcacccagggtggagtgcagtggcgcgatctcggctcactggaagctctgcctcctgggttcacgccattctcctgcctcagcctccaagtagctgggactacaggcgcctgccacgaagcccagctaattttttgtattttaagtagagacggggtttcaccatgttagccaggatggtctcgatctcctgacctcgtgatctgcccgccttggcctcccaaagttctgggactacaggcgtgagccaccgctcccggccagcagcagctttatttgtaattgccaaaacttgaaagcaaccaagatgtcctttagcaggtaaatggataaataaaccttggtatatccagacaatggactatattcagcactagaaagaaatgagctattaagccatgaaaaggcatggagaaaccttaaatgcatattagtaagtgaaagaagacaatctgaaagagctacatactgtatgattccaactatattacatcctggaaaaggcaaaactatggagacaataaaaaagatggcaggggctgggagtggggagaaatgcacagaggtggtgcacagagaatatttagggtagtgaaattactctggatgttataatggtggatacatgttattacacatttgtcaaaccctacaggatgtacaacaccaagaatgaaacctaatgtaaactatgggatatgggtgatactggtgtgtcaatgtagcttcattgcttataacaaatatatcctctggtgcctgatgttgttggtggggggaggctatgagtgtgtgtggggtgggggaaccctgtattttctgttcagttttgctgtgaactcgaaactgctcttaaagatgaaatttttattttaatgggtaaagtatttgaataaccatttctccaaagaggatatacgggtgaccaataagtacatgaaaagacattcaacatcatgagccattagggaaataaaaatcaaaaccctcgtgagataccatttctcacccagtagaatggctagagtgaaaaaggcagacacagccagtcacggtggctcacacctgtaatcccagcattttgagaggccaaggccagtagatcacttgggttcaggagtttgagaccagcctggccaacgtggtaaaacctcctctctactaaaaataggaaaattagctgggcatggtagtgcatgcctgtaatcccagctactagggaggctgaggcaggagaattgcttgacccgggaggtggaggttgcagtgagcccagatcatgccatttcactccagcttgggtgacagagcaagactccatctcaaaaaaaaaaaaaaaaagacaaaagatagtgttggcaaggatatagagaaattagaactttctatactttgctggtgggaatgtaaaatggtgtagccatttgggaaaacagtctggcagtttcttaaacagttaaatatggccaggagtggtggtactcacttgtaagaggccgaggcagaagcattgcttgagcttaggagtttgagaccagactaggcaaaataatgagaccgtatttaaaaaaaaaaaaaaaagttaaacgtggacttactatatgatccagcaattccaatcctaggtatttaccctgaagaaatttttttccacacaaagacttgtatgcaaatgttcatagcagcattattcaccatagccaaaaactaaaaacacccaaatggctatctgttgataagtggataaacagaaggtggtctgtcacccaggcatggtggctcattcctataatgtcaggattgcttgaggccaggagtttgagaacagcttgggcaacatagtgagactgcatctgttgagggaagtcaggaaccccgaacggagggaccggctgaagccgtggcagaagaacataaattgtgaagatttcacggacatttgttagttccccaaattaatacttttataatttcttacacctgtctttactgcagtctctgaacataaattgtgaagatttcatggacacttatcacttccccaatcaatagccttgtgatttcctattcctgtctttaatctcttaatcccgtcatcttcgtaagctgaggaggatgtatgtcgcctcaggaccctgtgatgattgcattaactgcacaaattgtttgtagagcatgtgtgtttgaataatatgaaatctgggcaccttgaaaaaagaacaggataacagcaacgttcagggaacaagagagataaccttaaactcttgactgccagtgagccgggcggaacagagccatatttctcttctttcaaaagcaaatgggagaaatatcgctgaattctttttctcagcaaggaacgcccctgagaaagagaatgcgtccctgagggtaggcctctgaaatggccacttggggggtggctgtattttacagtcacagctgtagggatgaaataagccccagtctcctgtagcgctcccaggcttattaggatgaggaaattcccacctaataaattttggtcagaccggttgtctgctctcaaaccctgtctcctgataagatgttatcagtgacaatgcatgcccaaaacttcattagcaattttaatttcgccccggtcctgtggtcctgtgaactcgccctgccttcatttaccttgtgatatcttattaccttgtgaagcatgtgatctctgtgacccacaccctattcgtacactctcttcccttttgaaatcgataataaaaacttgctggttttatggctcagggggcatcacggaacctgctgacatgtgacgtctcccccggacacccagctttaaaatttatctcttttgtactctgtccctttatttctcagaccggccgacacttagggaaaatagaaaagaacctacgtgaaatatcaggggtgaattttgcccgatagcatctctacaaaaatttgtttaaaatagccaagcatggtggtacgtgtctatagtcccagctactcgaggggctgaggtaggaggattgcttgaagccaggagttcgaggctaccataaactatgatcctaccactgtactccagcctgggtgacaaaaaaacaaacctaaacaaaacacaaaatatggtgatacggtttggatatttgtcccttccaaatctcgtcaaaatgtcatccccagtgttggagttgaagcctggtggaaggtgaatggatcatggaggcagatccctcatgaacggcttagcaccatccccttggtgatgagtgagttcatctgtaatctggttgttaaaggtgtgtggcatctcccgctttgctctcttgttcctgctgtcaccatgtgacatccctgctctcccttttccttctgctgggatttgaagcttcctgaggccctcaccaggagcagatgctggagccatgcttgcacagcctgcagaactgaatcaattaaacctctttttcctctctctctttttttatttttattttttttgatatggagtctcactctgtcacccaggctggagtgcgatggcacgatctcagctcactgtaacctccgcctcccgggttcaagcgattctcctgcctcagccttccaagtagctgggattataggcgtacgccaccatgcccaggaggcagaggttgcagtgagccgagatcacaccactgcactccagcctgggtgacagagcaagactccgtctcagggaaaaaaaaaaaaaactaccaaattgttttccagaataactgaatcattttacattctcattggcaattcatgagtgatctagtttctccacatcctcttctacatttggtgtagcaactgtttacatttagccatttggaataagtgtacagggatagcccattgtagttttagtttgcatttccttaatggctagtgatattgaacatcctttcccaagtttatttccaatgtgtatattctctttactgaagtgctttttcatgtcttttgcacatttttatttagattatttatttttgagttttgggagttctttatatattctagatactagtcctttatcagatacgtagtttgcaaatattttctcccactctatgccttttcatcctctgaacagggtctttcacagagtaaaagtgcttaattttgatgaaatctattttattatttttcctgttatggattgtgcttttagtgtcaagactaaaaatgccttgtgtagctctaggtccagaagattttctcctaaatgtttgatgatgtacatttaagtccatggtttggtttggtttttgttttttggtttttgtttttctttgagacagtcttattccctcacccaggctggagtgcagtggcatgatcttggcttactgcaacctctgcctcccaggttcaagcgattctggtgtctcatcctccaaagtagctggaattatagatgcgcaccatcacgcccagctaatttttgtatttttagtagagacagggtttcaccacgttggccaggctggtcttgaactcctgacttcaagtgatctacctgccatgctggaattataggcatgagccactgcaccttgttgtaatttttgtatataatgtaagatttatttcaaggttcattttcttgcctatgaatatctgattactccagaaccatttgttgaaaagccatttttcctccattgaattgcatcagcacctttgtaaaaaaccaactgggcacatattagttggtgacaaattcttttagttttccttcctttgagaattttacaatttcccccagcattcttgaaggatattttcattggatatgggattctgagttgatagtttttttaacaatggaaaagtgttgtgtcacttctttctggtttctgttgtctctgatgagaaataagctgtcattcaaattattttttctatataagtaacatattgtttttctctggctgctttcaaaaaatttttttgttttgttttcagaagtttgactataatgtatcttggtgtgaacttctttgggtttatcccaattggaattctctcagcttcttgaatctattgttttatgcattttgccaagtaggaaagttttctttgaatatttgttcatttgattatttatttattaatgtatttttttgagacagggtcttgctctgttatccaggctggagtacagtggcagaatcatggctcactgcaacctagaccttccaggccgaagcgttcctcccacttcagtccccagagtagctgggaccacaggtgtgcaccaccacactcaatttttttgtttttgaggcggagtctcgctctttcaccaggctggagtgcagtggcatgatcttggctcactgcaatgtctgcctcccagattccagtgattctcgtgcctcaacctcctgagtagctgggattacaggtgcctgccaccatgcctggctaatttttgaatttttggtagagacggggttttaccaagttggccaggatggtctcaatctcttgacctcatgatccgcctgccttggcctcccaaagtgctgggattacaggcgagagccaccacgcccggccccctcctatgttgtccaggctggccccaaactcctgggctcaagcaatccttctgcctctgtctaccaaaatgctgggattacagggatgagctatcatgccccactctgatcttttattaacagtctcacaggccctgaggttgtgtttattatttgtttcttttcttttcttctttttttttttttttttttttttttttttggttgagatggagtctcgctctgtcgcccaggctggagtacagtggcgcgatcttggctctgcctcccgggttcacaccattctcccgcctcagcctcccgagtagctgggactacaggtgcccaccaccatgctcggctaatttcgtttttgtatttttagcagagacggggtttcaccgtgttagccagggatggtctcgatctcctgacctcatgatccacccacctcagcctcccaaagtgctggggttacaggcatgagccactgtaccggcctcttttattttctcttttctttcttgtttactttttccagtccattttctctctgttgttcagattgagtaatttctgttgtcctgtcttccagttaactgcttgtgttgtcctcttttccacttttgagcccattcactgagctttttatttcgttgttgtattttctatttctaaaatttctatctgattcttccttatatctcctatttctatgctgagactcttttttattttttcaacatgttcataactgtattttttttttttgagatggagtctcactctgtcgcccaggctgaagtgcagtggcacgatctcggtgcactgcaacctctgcctcccaggttcaaaagattctcctgcctcaggctcccgggtagctggaattacaggcatgcaccaccacacccagctaatttttgtactttttgtagagacagggtttaaccacgttgcccaggcttgtctcgaactcctggactcaagcaaccaacctgacttggcctctcaaagtgctgggattacaggcatgagccactttgcccggcctgagttgcattcctctatgaattttagaaaaagcaatcaatttcaacaagaaaattgctggaatttttattgattacactgaatctatagattaatttgagaggaactgacatctttaaaatgttgagtcttctgattcatgaccatggtatggctcttcattgatttacatcgtctttaatttctctcagcaatgttttgtagttattagtgtatgattttgcatgtagcttttgttatattttttgtctatgtattttatattttggatgctgttataactggtttttaagaagttttaattcccaattgtttattcctattatatagcaatataattgattttaatacagtgatcttgcatccttcagccttgttaagctgtagttgctttttggatgatcccacaggattttacacacaatcatgttatttgaaaatacagttttatttctttctttccaatctgattgccttttacttctcttttttgacttgttcactggctagagcttctagcacaatatcatacagaagtgatgagggtagaccgggtgcggtggctcatgcatgtaatcccagcactttgggaggccgaggcaggcggatcacctgaggtcaggagttcgagaccagcctggccaacatggtgaaaccccatctctactaaaaatacaaaatttagcttggcgtgatggtgcacacctataattccagctacttgggaggctgaggcaggagaatcgcttgaacctgagaggcagaggttgcagtgagctgagatcatgccattgcactccagcctaggtgacagaacgagactctgcctcaaaaaaaaaagcaatgagggcagactttttttgccttaaattaagacattcctggccagctgtggtggctcatgtctgtaatgccaatactttgggaggccaaggtgggtggatcacctgagatcaggaatttgagaccagcctggccaacatggtgaaaccccgtttctactagaaatacaaaaattagctgggcgtggcggcaggcacctgtaatcctagctattcaggtggctgaggtaggagaatcacttaaacctgggaggcggaggttgcagtgagccaagattgtgcccttacactacagcctgggtgacaagagtgaaagtctgtctcaaaataaataaataaataaataaataaataaataaagacatttctgaacttaggaacaaagcatttagtattttaccattgagtatgttgctagctgtaggtttttcgtagatacccctcatcggattgaaaatgtttccatgaattcctcgtttgctgggaattttcttttctttgaggttcagatgttgattttgtgaaatatattttatgcatctattgatataatcatggaatttttctttttctgtctgttaatatggttaatttcatttattggtttttgaatgttgaaccaaccttgcattcctgggagtaaatgctatagataatgttgtatatatttacatattattttcaatgtgataagattttgttaatatttgcatctgtgtttatgaggatgttaatctgtatcatctttacctgttttttttttgttgtttgtttgtttttgagatggagtcttggtctgttgcccaggctagagtgcagtggcgtgatcttggctcactgcaacctctgcctcctgggttcaagtgatttccctgcctgagcctcccgagtagctggcagtacaggtgcttgccaccatgcccagctaaattttgtatttttagtagaagatggggtttcatcgtgttggtcaggctggactcgaactcctgaactcaagtgatccgcctgcctcagcctcccaaagtgctgggattacaggtgtgagccactgtgcctggcccattaaggtgcatatgtatttaggattgtgatattttcctgttggactgattttttttttttttttgagacagagtctcgctctgtctgcccagcctggagtgcagtggcgtgatctcagctctcatctcactgcaagctccgcctcctggattgatgccattctcctgcctcagcctcccgagtagctgggactacaggtgcccaccaccacacccggctaatttttttgtatttttagtagagacggggtttcaccatgttagccaggatggtcttgatctcctgacctcgtaatccgcccgtctcagcctcccaaagtgctgggattccaggtgtgagccactgcgcccggctggactgatcttttatcgttatgtaatgtccctttttgtctttttttttttttttttttttttttgagacagagtctcactctgttgcccaggctggagtgcagtggcgcaatctcggttcactgcaagctccacctcccggcttcacaccattctcctgcctcagcctccagagtagctgggactacaggcacccaccaccatgcccagctcatttttttgtatttttttagtagagacggggtttcaccatgttagccaggatggtctcgatctcctgacctcatgatccacccgccttggcctcccgaagtgctgggtttacaggtgtgagctaccacgcctggcccctttttgtcttttttttaaccgttgttgctttaaagtctgtttgtgtgatataggaatagctactcggcaaggcatgatggctcatgcctgtaatcccagcactttgggaggctgagacaggtggatcacgaggtcaggagattgagatcatctttgccaccattgtgaaaccccatctctactaaaaatacaaaaattagcttggtgtggtggcatgcccctgtagtcccagctactcgggaggctgaggcaggagaattgcttgaactcaggaggcagaggttgcagtgagccaagttagcgccactgcattccagcctggtgacagagcaagacttagtctcagaaaaaaaaacaaaaacaaaaaaacatagctactcttggccagctcacatctattatcctagcactttgggaggccaaggcaggcagatcatgaggtcaggagattgagaccatcctggctaacatggtgaaaccctgtctctactaaaaatacaaaaaatttagctgggcatggtggcgcatgcctgtagtcccaactacttgggaggctgaggcaggagaattgtttgaacccaggaggcagaggttgcagtgagccgagatcgtgccactgcactccagcctgggcaacagagcgagactccatctcaaagaaaaaaaaaaaagaatagctactcgtacttgcttttggtttccatttgcgtgcagtatctttttctacccctttaccttaagtttatgtgagtccctatgcattagatgagtctcttgaagacagcagatggttggttggtgaattttatccattctgtgtcttttaagtggagcattcaggccatttacattcaatgttggtattgaattatgagatagtgttttattcatagtgatagttgtgcttttttaaattgtgttattgttttataagccttttaaaacatatacttaaaggaggttctatttttgtttcaagatttagaactccttttgacatttcttgtagtgctggcttgctagtggcaaattctctcagcatttgtttgtctgaaaaagactttatctctcctcatttatgaagcatagttttgctggatacaaaattcttggctggcaattattttgtttgaggaggctaaagataggaccccaatcccttctggcttatagggtttctgctgagaaatctgctgttaatctgataggatttccattgtaggttccctgatgcttttgcctcatggctcttaagatgtttcccttcatcttgactttagataacctgatgactgtgtgcctaggtaattatctttttgcaatgaatttttcaggtgttctttcagcttcttgtatttagatgtttagatctctggtgagagcaaggaacttttccttgattattccctccaataagctttctaaatgtttagatttctcttcttcctgaggaacaccaattattcttaggtctggctgtttaacgtaatcccaaatttcttggaagctttgttcatttttaaaaattcatattcgccgggcgcagtggctcacgcctgtaatcccagcactttgggaggccgaggcaggcagatcacaaggtcaggagatcgagaccatcctggctaacacggtgaaaccccatctctactaaaaatacaaaaaataagccaggtgtggtggcggtcgcctgtagtcccagctactcaggaggctgaggtaggagaatgctatgaacccaggagacagagcttgcagtgagccgagatcacgccactgcactccatccagcctgggcaacagagcgagactgtctcaaaaaaaaaaaattcttttttatttgtctttgtctggttgagttacttcaaatgctttgtcttcaagctctgaagttctttcttctacttgttggagataaatgttcagtgccacaaagcgaaaccagcactcaggcaaaaattttctcagcaaggcaatttacttctgcagaagggtgctgcttgtgtcaatcacgattgcaagagcacactgaacaaaggaaagcaggggtttttattcctaatgcagtccctgcctctttgtcattcctccatgggctgtggttggaccgcacaatctaaactgacccaattggctatttgtgaatactttcccaaataaggaagggaagggaaatgtgagttacaatggtgggatgtgcggtttcaaagggaggaacgggtgaagagtgggtaaccaagggaacagatgtgagttattgattaggactgacaggaaagttgtttacagttacagtaactaggggcaaggaggcatagagaacaagaaagttgagtttgagaacaaagaacaaggaagttaacaggctaaacctttgaagaattttattgtatcctacaatttcccccttttaatttttatagttcttcctcttcaaacctttttaagatgtcttggctttgctgtttgacttgatcgtctgaaaggaaacgcttatctgaataaggtggaggagagctaagggagattttagtaagtgctgtttctataagcctttgtactagcccatggttgcatggtgtgacacaacacccaacaagaatgagtacacctattatgactgcaagagaagtaagaattgaggctatgattcctttctatttaccaaaccacctgtctagccatcctgaagaagggttattgactccagaatttttagctaattcattagataaaatggtaagtccttgtaaggcttttgttatgctcccatctggggcagtatggtttgggatgaaggtacgacactgagttttaatcataacacaaactctacctttttcagctagtatcatgcctagggccattctgttttcctaagccatctggctagtcagccctaactcctcagctattcctttgacagcatccctggtataattaataaactgctgttggttataatagatgtaatttatacagtctacatttttattaatagttacccatggaaatattgattcaaatcctgcagactatttggtcccgggcttttaatttatcaggtactccccatgggactccagttgcatctaaataaacttgagagtcaaaaaacctataaggggcttctcttattttatggtgttgtggcttttctttttctggctgatgaaacgccagggtgaaagggatagccaaatggacaagagtgcaggtaccactccagttacttggcagagtgtccagtaagggtccgccacaataccaccatacatcttcttgaggatgactaagggcagactgatgggtaagctcttggaaaggcttaagctcactgcatcctgttaagcttccaaggaacaccaagttttccccttgtcgtgagagacaggacgtgaaattgacattgggagccagaagctggatggccctctggggctgacccgcaggatattgaactttgggatagagcaaagagagagcttggcatgattgattgccccaagctatggaatcctggaagagagctaccatgctgcccatgcctggttgactgggggaccagccgagtgtaaaggggtctatctgggtctctggctggccgtgagcacaagcataacaattgcttttgtttcatgtgcggacagaatatttggtccattccaaccaggcatttgcatcttgatattttgtttcaattgctaaagtttgccttagatcatttacttctacaatatctactttagtcttatcattgggtatagaaggtatggcagtctgattagaagaaggcttagaaggagaagagagggaagagggtgaagaggatgagggattaataaaacgcatttcaaaagaccctatgaggtctgtgccgcgttggtccctatgccatagaagcgactcaaagtaggtctagagggtcggtagaggccggagtgagagtagaaatctgcactggattacactggttatactgaaaatcgaggggaggggtgcttcctttagtaaagtgaatgtatgattttaagtatatacagccacatgttgatgaggtccagccttgatactcagttgtccacagaacatcattccagctatggcagacctgtttccctatattttatgaggagcaagagtcttggtagcgggagccttttattttaaagtggcagagatacttttctaaggctgagagttgcctttgactttggagatctctacagggtatgactaaacaggcatcaaacataataacttggggtgagtttgatttagtcacattgataacaaggtggtcagcaacagaatgaggaaagaagaaagagtaatagagtagacgaaagagagttaaacttttcttagctttagtttgagggggttttcccctgggataatggcccatgactctggaggtgacagtgctttcttgactcaggtgtgatgggtctatcctttttctgctgtccggactgcagtttcagtggttagaagcaccaggtaaggtccttcccaggctggctcaagtttctcctcttttcagctcttgataaggacgtgatccccaggctgatgttgatgtactgggaactccagaggcagagcctgtgctaggagacctttggttttaagaaaagagaaagtaggggagagactaagaatataattcctgaggaactggtgtttttggaacatcagcagtggagtgtaaataaggcaatccatagagcatcttgtaaggggaaaggccagtatcttttcgaggagcagtttggattcttttttttttatttggttttgtcaaatgttttattgagtgtagacatctggagtactataaaacatgcattatctgtagattcaaaaaggagcaagccacattgttctcactgtcaaatgtgttaggcttggcatacatgatggagattaatgaagtatcatgagagtaacatggttcttgaaaagcttctataatttggagtagggtcttaatcacatgaaaagcaaaggtgttcacatttagtgaacttgcatttcattggggggagagggtacacagtattttaattttaaaacaaaaataatttgtttgtcaaagattcccatctccccaactttatttgtcccattggttttcagaaattttaatttttaaaaaatcagatgccttttggaagttgtatgtttatctgagcagtaactaaattttatttcttcttcagttgttaaggtgtgttaaatttgaagaagataatatctccatcttcaacaatataatttctgccttgttgtctgtactttccagcagccttgactgcattttcagaaccttcctctttaaaatcttcatatttcattacttcagccataatgaatcccttttcaaaatctgtgtgaatctttcctgcagcctgaggagccttagtccctttcctgatggtccgtgcacgcacttcatctgggcctgcagtgaaaaagtattttagttggagtgctgcaaacccagccttaatgatctttggcaaagcactttgtgtcatgttcgcttccagatactgctgtctctcctcagcactcaattcttgcaacttgagttccaaggccccactaaaaggaatgaccaaggcacctgggtcatacttgtccacccactctttaatttttatcagccatttgtttttctttctaatgtagtctttttcagaaagattaaccaagtagaccattggttttgaagtcaaaaataagtgtttattcaacacttcaatctctttgtcattccaatcatgatagaagcgaacaggttcttttgatctataacccaggattttactttgcacattatatcatatttgggttttagttttttatctcctcctctcacagccaccttttctagtttatctataatgggcccagtcattcctcatctttaagctgaagctcttcatgtattatttctatatctcgaataggatctacactttcttcaacatgtgtgatatcatcatcttcaaaagcacgtgttagatgaaagatgccatcacaagcactaaaatgagataaaaaagcattccccaggccctgcccattgtgagctcctttcacaaggccagcaatatccactacatttagaaaggcaggaattttgcttgctggtttgtgatattggcaaagaaagtcaaacctttcatctggcacaggtactctgctctcattaggatcaatagtgcagaatgggaagttttctgctgaagcctgactattggttaatacattgaagaaagtagatttcccaacatttggcaatccaacaataccaattttcagtgaggttccaaatcttccaatgattgggggtggtttaattccatcacctcccttttgagggggcatcgtgctcagcctgggctatgacacggggtcccagtagcagcgagagaaaggtcctgccggcagccagaggcggggaggaaggaggagagaacgcaggcccggcccctccgccgagcggcatgccgcactacggcggcgacagcggtggaaccgccgtttggattcttaacagggcaataggaagatatttgatccctggcaaccgaatctatagaactaacttggttaaatggttctttaaggtctgattcatcctttctactctccctgatgaaggtgggtgccaaggagtatgatatttccatctaatgtctagcgcttaggatagctttttaatgatatgtgctatgaaataggtttcactgtctgagtcaatattttctattagcccaaacctgggcactatattttcaattaatgctttaactacatgattggccattgcatttgaaaagggaatagcttcgacccagtgagtgaggtgatctgctattactaagtactttaggcaaccgattgggggcatttcaatgtaatcagtttgaacactttggaatggtcttagccctgaatccctccccgcccagggatgatttctttataacttgtttgttggtttccttacatgttaagcaactatccataacctgtttggctagggtatatacccataaaccctgagaactgtgtcacacatggcttggggtccccagtgtgtcccttgatgcaggtgggtaggatttctctcatgagcggtttgaatagcatttctctttgatctggtaacacccattttccttctgagttttctttggctccatttttattaatttttccttttctgcagcagacaaggtaggggttgcagcagggggaggaagacgaggggttaagtgaaaggtgtttcagatgaaatggcagcctgtttagccacttgatctgcaaggttatttccctgacttgtaaaggaaaagtcgttttggtgtccggggacatgtacaatggctatttcttctggcaactggagattgtttaaaacatggacgattagctcctcgtgggtaagatattttggcctttagtttttttttgttttttggtgtttttttgagacggagtcttgctctgtcacccaggctggagtgcagtggcacgatctcagctcattgcaagttccacctcccgggttcacgccattctcctgcctcagcctcctgagtagctgggactacaggatcccgctaccacacctggctaatttttttgtatttttagtagagacggggtttcaccatgttagccaggatggtcttgatctcctgacctcgtgatccgcccacctcagcctcccaaagtgctgggattacaggcatgagccaccgcgcctggcctggcctttagtattaataagaccttgctcagcccaaatttttccaaatatatgagctactccaaaaatgtatttagaatcagtatgaatagttccttccttgctctgtaagtgttttaaaacctggctgagtgcaaatagttcacatgctttggcagaccaactattgggcaaccttcctgactctgtttcttcaagagtttctccatcaattactgaatacccattgtatttttctcctttaattgcttgggatcaaccatctataaataagtgtcaccccattttgaaaggggtctctcttagatccggcctgacctttgtttggtagtcagttagatctagacataagtgttctctttttagatttgggtcccctgttaagaaacctctcggattgagtgagttatcagtagtcaaggttaaatcatctttttagtaaaatagcctcctattttaagattctggagtcagtgagccaccttcctgcttttttatttaaaatagctctaacttggtggggtgtgcttacagtcaatttccccccaaagattaattttctactttcttcaactaatactgctgtagctgcaacgaattggatgcactgaggctacccacaggtgactgggtctaaaatttttgataggaaggctacgggctgccggtgaccaccatgttcttgagtaagaacccctaaagctaccccgttatttacattaacaaaaagatgaaatggcttttctagggaagctaaggctaagacaggggcagttatgagtttgtatttcagctcttcaacctgattgacttcctcagaagtccacaggagacggtccagtttccactgggtaagcttttcatataaaagtttactttttagggcatatgagtcaatccataagcatcaatatccaactaatcctagaaattttctgagttattgcttagtttgaggcaagggtaaggacacgatgccttcaactcgttcaggtcctatcctttgcttacctgcacttattaagtggcctaaatatttaacttcaggctccacatactgaagctttccctttaagaaccataacccctcgaactccagatggttaaggatatgtgtagagaagccagctactttctctacatcttcaacagatacgagaatatcatccatgtactggagcaggcatatttgctttgggatgacaactttttctaacacttgttctaaaatttgaccaaaaaggtttggagagtctgtaaacccttgaggtaaaactgtccatcaataatgttgttttcgccctgaatggggatcctaccactcaaaagcaaatatgtctcagctgtcttcagccaaggggcatgcccagaaggcatcttttaaatctattactgtaaacaactgatggttttttggaattttgctgagaatggtgtatgggttggggacaacaggatggttagtttggactatttgatggctctaagatcttgtaccaagtcggtatgacgcatctaatttcttgactggcaatattggagtgttatacggggacatacagggttcaaggagcccatctttaataagactttcaattataggctttaatcctatcctgccctctaggggtttggggtattgtttcctccttactacttccctggggattcttaacttgatgtggattggagggattcagagtttctcccggtttccttcccttgaccagacactaggattaatgcatttttcatctgtggtggtgagtaggtttaatgaggtaaagaatcctttaggaccaacttgtaagcctgtgcctaattctagcattaagtctcttcctaatagattagtttctgcctcagggatcaacaaaaattggatatgagtcagccgatcttggtatttaacttctgtactttctaagatttttgctttaaatccttctccttttaccccagagactaaaagttcttctgaagagcaggcaatgttggatggggggaagcaaatggaggagcgagccactcctgaattgactaaaaggtgataagctcatgtttggttcccacctgtaaatttatcaagggctcctggtgggactcgagataaacagagcccctgacccccctgttcttcctcaaaagtcatgagttgaagggcttctttctccttttccagtttgggacattctcttttgaagtggcctgcccttcaaacggtctggacggaccgtttatagtttctggccccctggaagctttgtttagaagcataaacgagggtctggaccttttatagtttctggccccctggaagctttgtttagaagcataaacgagggtctggaccttttatagtttctggccccctggaagctttgtttagaagcataaacgagggtctggaccttttatagtttctggccccctggaagctttgtttagaagcataaatgagggtctggaccttttatagtttctggccccctggaagctttgtttagaagcataaacgagggtctggaccttttatagtttctggccccctggaagctttgtttagaagcataaatgagggtctggaccgtctatcgtttctggccccctggaagctttgtttagaagcatgtgggtgtggggccacctgctggaaagtggataacgtgagtttttgccttttgtttttgcttctttcctcacatatattttttgagcttctcccagaagttcacttagaggttggttttcccagtcttctaatttttgtaacttttttgaaatatctggccaacttgtagtgacaaaatggagctttaacactccctgtccaaggagatcttccaaatttaggcctgcatattgtcttgtttggtcctttattcttgtctagaaatttcataggccccctcatctttttcctattgtatatcaaatgctttagagaggttttgggttcagggtactgattccctaattccctttattatcatttcccttaggtcttgcatattttcccagtgagctgcattaatatcgtcccaccgggggtcttgggtgggaaacttttgatctgcggtaggaatgtttgaccaggagggtgttcgtgttcccaaattgccatagcagccctacagatcatgcttctttcctcccctgaaaagaggacgcaggccgggcgcggtggctcacgcctgtaatcccagcactttgggaggccgaggcgggtggatcatgaggtcaggagatcgagaccatcctggctaacaaggtgaaaccccgtctctactaaaaatacaaaaaaaattagccgggcgcagtggcgggcgcctgtagtcccagctactcgggaggctgaggcaggagaatggcgtgaacccgggaagcggagcttgcagtgagccgagattgcgccactgcagtccgcagtcccgcctgggcgacagagcgagactccgtctcaaaaaaaaaaaaaaaaaaaaagaaaagaggacgcctaggatggacattaactccacccaagtgtataactgaggtcctaagaattgatcaacctgatctgttacccaataaggtcatccaataacggcttaagttccttcttcaaacttcagacctctgaactggttaagggagcattcacaaaattaatagcccccctgtccttgtggcacctcttttaaggggaagagagttggggctgactccatagatgtggagggaaatgggaaattttggatatcttttttacattgttctacctcacgttggagtccttttagggaggggtacttaggctgagaaggaacaggctaatgggatggtgattcccaagaatcaggattgtaaggaggaggaataacatgagcaggagaaggatctggagcaggaacggggacagcagctgctacctgaggggaagggttaggggcactgagcgtgggggaagatggtttagaggatcccatgtgctggagtctttaggcatggggactggcttttctcactcttcagtttgaggtgctagattgggtttttccctagttgtctttaagggaaagaggaggacaggtccctgcctccaacaaagagcataggccaattcttcttgagaaactggacttttatcatttacatattgaattagaagttgacacatcacatccttgttcaacccaaactttgaccaaaagattgagggtttgaggatgggtccctgagtccaaataaaacagcaattgtttgtcatttgttgctttttcttatgtttagttctctcattatctttccaatattttaacatgagacctaggggactaacagcaggaatatctttattgctgtctttatcctttttactccgtgtcctgcttggggtgtttcccatgttgggtcctagttaggctcagtccctcatattagagatttcttgcctatccttttctggaggcttgctgaggctcaatccctcgtattagagatttcttgcctctccttttctggaggcttattgaggctcaattcctcatactagagatttctatcctttagccccacctgctggaggctccttgcacccttcttttgcttcgtccactctggtcgcttcccggaggggaatttaggtccctcttacctttggcacgcccatataaaccccatggcaggatctgtcctaagccatatgaggtgaccatggaacctcagataggacacactcattccgcacagcagtagtgcttagtaccattcacacaagcagcaccgcaagcagtaatgcttgtgatcattcatacacactttcaatctccagaatatcttgaccaccaaggaaatgctttgtcacccctgtgacgtttcttaccttggtctgtgcacaaagttacctggtcaccatggtgttgcaagcctttttttccccacattgctgagagtccggatttattcgtcacaccgggtgggttccgatccctcaccctgaggccaccgcaacgaggcagtgggatgcgtctccttatgagaggtgaccagagaccccttccctggaggagaatgggaatcctggatgagccccagatttgttggagataaatgctcagtgctgcaaagtgaaaccagcactgaggcgaaagttttctcagcaaggcagtttacttctgcagaagggtgctgcttgtgtcaatcacgattgcaagagcacactgaacaaaggaaagcaggggtttttattcctaatgcaatccctccctctgtgtcactccttcatgggctgtggttggactgcacaatctaaactgacccgactggctatttgtgaatactttcccaaataaggaagggaagggaaatgtgagttacagtggtgggacgtgcggtttcgaagggaggaaggggtgaagagtgggtaaccaagggaacagatgtgagttattgattagaactgacaggaaggttgtttacagttacagtaactaggggcaaggaggcatagagaacaagaaagttgagtttgagaacaaagaacaaggaagttaacaggctaaacctttgaagaggaattttattgtatcctacatacttgttctagtctgttgttgacactttccagtgcattttttatttctttaagtgtgtcttccatttgcagaaattgtgatttttttttctttataatatctgtttctctggagaatttttcatccatagcctgtattttttttgttgtctttttctttctttctttctttcctttttgagactctgagcactctgttgctcacagtgcagtggtgcaatctcagctcactgcaacctctggctcctgggttcacgcaatccccctgcctcagtctcccaaatagctggtattacaggcacgcaccaccatgcctggctgatttttgtatttttagtagagatggggtttcactgtgttggccaggctggtctgaaactcctgacctcaagtgatcagcccgcctcagccttccaaagtgctgggtttacaggtgtgagccactgcgcctggccaatccatagcctgtattgttttttacatttctttgttttcacttttctctggtctctccttgagtagtttaataatcaaccatctgaattgtttatctggcaattcagagatttcttcttgatttgcattcattgctggggagccagtatggtcttttggaggtgttatagaaccttgttttgtcatattacaatttttctgatttcttctcacttgggtagactatttcaggggaaaaatctggaactcaggggctactgttcagattcttttgtcccacaaagtgaccccttgatgtgatgcattctcacttcccctagggatggagcttcgtgagagccagactgtagtgattgctattgctcttctgggtccagccacccagtggggctaccaggttccaggctggtgctgaggaatgtctgcaaagagtcctgtgatgtgatccgtctttagctctcctggccatggacaccagcacctgccctggtggaggtgggaggggagtaaagtagactgtgagtgtgagagtccttgcttgtagttttgtttactgtgctggctttctcaaatgctggttatgctagcagtgaagttgtcacgtggacagactcaggagctctggttagccaggatgttgaaagcagtggaattagctgtttctcatttcttggagcagggttattctgttgtgagttgctgtaatgtcctgacttggttggcctccagccaggaggtggcgctttcaagagaacaccagctgcaatactggaagggggatataagcttgccctaagttggccaggataagtattaggatttctcaggtgatggacagggccataaagctcccaagagtttatggcttttgtgatcagctaccagggcgggtagagaaatactgtcaggttggggcagggttaggtgagtctgagctcagactctttctgggaatctgttactgatttgtaatttttaattccacagtgtttgaaggacata

SEQ ID NO: 758 - DNA, 359 bp, Homo sapiens
gctgatgcctgtagtcccaacactttgggaggcggaggcaggaggatcacttgagcccaggagttcaagactggcctgggcgcggtggctcacgccagcactttgggaggccacggcgggtggattacttgaggtcaagagtttgagaccagcctggccaacatggtgaaactccgtcttttctaaaaatataaaactagctggatgtggtggtccatgcctgtaatcccagctacttgggaggctgaggcagggagaattacttgaaccaggaggtggaaggtgcagtgagccaagatcacaccagtgcactccagcctgggcaacaacagcgagactccatctcaaaaaaaagaaaa

SEQ ID NO: 759 - DNA, 1737 bp, Homo sapiens
actcaggtaatcatatgctcattagaaactcttgggcactgcctgtgtgcccagcccagcccattatgtcggtgaggacagacgtggaggacagcagtccctgcccttggttggggctccaggccagcaagggccacagccccagaaggcagagcaggaagacaggactcggggcaggtgaagcagccttctcgttggcagaagggaaacagaagcccggggtggggaagggtggggaagggtggggaagggtgggcccggggtcacacggggtaatggcagagcaaggactagggtcagggtctctggctctcagctgcccatgccacctcctccttctctgcccgccccagtgccttatgggtccaaggttgactcctgtccctagggcaggcctgtgggccctgcctgatccctactgggaggatggtacctagggttggagccaaacaagtgtcctcctccagcgccagcctggccctgagtgcgaactcgtcactggtcaggggtccagacagcagcatccctgagggcccagagaggtggccagtcctgtggtgaggttgagaggtgtcaacgtgctggtggtcctcgctcgctctcagcgcctcctcggcctcagcttctgctctgaccacacttgaggagcccttcagcccagcgctgcactgtgggagcccctctctggactggtggaggctggagccggctccgtctgcttgcggggaggtatggagggagaggcgtgtgcgggaacctgggttgctcgcgggccagcaccagttctgggtgggcaggggctcagcgggccctgcactcggagcggccggctggtgcctctggccccaggcagtgaggggcttagcacctgggccagcagctgcagagggggcaccgggtcccccagtactgctggcctgccggcgctcaccacacttgaattgtcgccaggcctcagtcacctccccgcggggcagggctcaggacttgcagcctgccatgcccaagcctccctacggtgggctccctgcgaggcccgagcctcccggatgggtgcctcccactgctccacggcacctggtcccgtccactgcccaagggctgaggagtacaggtgcccggtgtgggactagcaggcagctctgcctgtggccctggcataggatccactaggcgaagctggctgggctcctgagtcaggtggggacttggagaacttttatgtctagccagaggattgtatatgcaccaatcagcactctgtgtctagctccgggttcgtgcatgcaccaattagcactctatctagctaatctggtggggacttggggaacctttatttctagctaaaagattgtaaatacaccaatcagcactctgtgtctagctcaaggtttgtaaacacaccagtcagcaccctgtgtctaactcaaggtttgtaaacgcaccaatcagtgctctctgtctactctatctagctaatctagtggggactgggacaacctttatgtctagctaagggattgtaaatacaccattcagcactctgtgtctagctcaaggtttgtaaatataccaatcagtactctgtgtctagctcagggattgtaaatgcaccaatcagctctctgtaagtggaccaatccactgtctgtaaaatgggccaatcagcaggatgtgggtgggggtcagataagggaataaaagcaggctgcctgaagtagcagcggcaacctg

SEQ ID NO: 760 - DNA, 468 bp, Homo sapiens
gcgagaccagccctgctccgaggctttgggtgcccccaacccctgcccacctgtgagagtcaccccccggagtgggttggagtttctctgagtgtggtgtgtatgagtttgactttggcgatgtcaggataatttggtctgttttcaacacattctggaaagcaccctgagcatctgaaggatggaaggattgggctttaaatcaagttttttcagtccccattggttatcttaaggggcgtttgactttaacttgattttctttttcccctgtaagtccctgacccagaactgtgatctattttcttttgtgttttcagctgttgagcatgttgggcagcacggagtgtagctacaactgtgtgaccccacctgtgtgactgactccacctgtgtgactccagtcgtgtgaccaactacaactgtgtaactgactccaattgtgtgactaactccacctgtgtgact

SEQ ID NO: 761 - DNA, 100 bp, Homo sapiens
cccctttccttcctgaaatgccagcaggaaggggttggagctcccgtgattagccagggagtcaggcttcctgaagtttacacaatacaaagcatattaa

SEQ ID NO: 762 - DNA, 481 bp, Homo sapiens
atggtagtatctgggcccccaggatgcctcacagtcttggcttccttcagttatagttggcagctgcttttggtccttacatgaatgactcattttgcatccgacagggactgggattcgacgaattacagtaaccggctcaaggtcacgccattctcaagtggtgccctgggttttaaactcatgccttgcggcaccagggactgccttcaaccaccaggctgttctcctttctgaaagggacaggtggctgggctcacaagggggacaggaagtgcagtaccttcccccatcccaggggaaaagtgttttttcccagggctgtgatctaagatcagctgtgggaaattggtcctaaccaggaagggtggcagccccaaagatgtcttattagagcgagccagggtgtctgcgggggtcagcagggtctaatggggcagggagtgctcagagaggagaccacctcccagggctgccctag

SEQ ID NO: 763 - DNA, 3068 bp, Homo sapiens
ccgatgccaggcaccctcaaggcacagaggctggggctcatgttgggggcacttggcctctccaggcctcgaaggcttctcctgggctgacgcgagctggggaacgggagggacggacgtgggagcgagaacgtcacactggaggcagctggtggcacgatgggggacagagtgaaaggtagcaagtcaaggtgaactgaaggatgatcagagcggagggaggctgtggacaggggcggaggctgtgggaaggggacccgtgctgcgcagcggggctagggaggttggacccgctgaggcaagggcacattgaggagaagccacaaccagggctcccgctgcctctgggagggctagggccacggccaggctgaagcctccctcagaccttagccgcctgaggacaaggaggagaggtgagcacgaggggacagacagagcccagagtccctgtcaccatctcttctcccaacccaaagcaagatgcagtttccatgacaacctggccggccagagagggggcaggggactgcagaggaaactttccacatcagcagggagaaagagggtgtgctgcaggggaaaggggggcacgcagggttcccagaacccccggtcaccatgctcactgtgctggacccgggaaagtggacagagcacagggaagggttctcccgcctccactcccgcaggcccacgcccccacgctgggcctgcggggaagggggaagactgagcccagaggctcaagggtcagatgtccaaagagcagcggctgcccaggccttgtgcagcgggcagcgagcagcccagggagccaggccccagacaccgcactcagggccatggccgacaggggcccgtggagggtgggcgtggtgggctatggccgcctcggtgagtccctgaccatccttggcctccttccccaaaccccttcctaaagctcccaagactctctgccctccacaaacacttttttctctctctatctgcccctggctgtgtctctgggtctgcccactgcacccccaccccaggtctctgtcctctccgtctctgtctcccttctctctgggcctctgtccaccccactgtgtctctgccctgcccccatctctgtctccctaccccgcaatctgagtctgtccccacctcctctctctctgggtctctgtccccacctcctctctctctgggtctctgtccccctctctctggatctctagccctctcctttccctctccccaggacagtccctcgtctcccgcctcttggctcagggaccagaacttggcctagaacttgtttttgtctggaatcgtgacccaggacgaatggcagggagcgtgcccccttccctgcagctccagaaccttgctgcccttggggaaaggtcagtgaccttgccatgggagagtggagctccctgaagctcctgtcctggctctcttagccactgtgtgatctcaggggttccctgaccctctctgggccttggttcaagcaaatgtgaaacaggacgaacccattcatctcatttcgcctcccaggtcagggagaagaagggcagccctcagtagactcggagggaaccttggggagaagaggcctaatacctctccaagaccctccgccctctttcccctctcccaggcgccctgatctggttgtggaagtggcccatcccaaaataatccatgaatctggggcacaaatcctgcgccatgccaatctcctggtaagccccaccccaaccatttacgcagagccctgccccttctgtcttggtctcaccccaccctgaagtggatatccttccctgacctcaaccctcccctccttcatccaccccaggtggggtccccctcagctctaagtgaccagaccacagagcggcagctcttggaggcctcacagcactgggaccacgccgtgtttgtggcccgaggggccctgtggggcgctgaggacatcaggagattggatgcagctgggggcctccgggtgaggcctgctgggctccccaggaaccaggggaggcctgcaaagaccccactccccctaacccgggctcttgcttccagagccttcgtgtcaccatggccacacaccccgatggcttccggcttgagggacccctggctgcagcccacagccctgggccttgcactgtgctctacgaaggccctgtccgtgggctctgcccctttgccccgcgaaattccaacaccatggcggcggctgccctggctgcccccagcctgggcttcgatggggtgattggggtgctcgtggctgataccaggtgagcagagctaagcagggtgttgggctgagtccaggctctccagactgactgcccctcttgtcccagcctcacggacatgcacgtggtggatgtagagctgagcggaccccggggccccacgggccgaagctttgctgtgcacacccgcagagagaaccctgccgagccaggcgcggtcaccggctccgccaccgtcacggccttctggcagagcctcctgggtgcggccaggcccctctcccccggccctgggctcctgtgttctgcagagcttgggggtcccgggctctcactagttctgcagttctggttctgtatttgttgacctttctttctttctgacctttatttccttaacctctctccatgactttgaatcctggcactgtagatgtctccatttgtgcccgcctctgatcgagactctctctgtctctgtccacccccagggctctgtcccgctctctccgggtcttcctccaccgcccccctgccctgtcccctcctcccaccactgcctcccccaggcgtctgtctcctcatctctcctctgtctcattcgctcattcccctctccccgcagcctgctgccagctcccctccaggccggggatccatctctgctgagaagcctcctccctcccgagacaagatcatctgcctggcctctcaccaccaccatcccacccctgccctgccccacttccccagggtctcccttctgactcagtaaagatcaccgctgcctccccccgc

SEQ ID NO: 764 - DNA, 3068 bp, Homo sapiens; identical to SEQ ID NO: 763

SEQ ID NO: 765 - DNA, 3617 bp, Homo sapiens
cgcactcggagcccagagccgccgcccaggaaggggatgcggaaacccctggctcggtggagcggagaggcaggcggggtgaggggcgttgccaggcaaagggcgagcgccgtggctggggtgcgggtcggcgaagggctccattccttggtgtccggggagggggcctggttgctgggtgataggaagaggaactcctgttgcttagtgactggggagggggccccgttgccaggtgacaagagcagagagcctcgctgctacatgaccggggaaggggagtcttctgttgctaggagaccagaggggaccctatcacctagagacaggggaggaggattctctattgctaggtgctcggaggacagactttgttacctagtgcggtggggagggggctttgttgctaggtaaccacagagcgccctggttacctagggacggggaggcaggttcctctgttgctaggtgaccatgatagggacccttttacttagagacctggtgagggtggttttctgttgctaggggagcagaagagacagcgtttttcgtaggaataggaataagggatggagggacgtgtgctgccaggagactgccagggagcggggtcaggggcccagtgtcttcctgggctgctccgagtcccagctcaatcaatggcgatgccccaaaggcctgctgggaggctggacctctagatcccgggcccctgaggaccttctccccctcccaacccccagcaggagccgaggacggcatgtcccaggccccgggagcacagccgagcccacccaccgtgtaccacgaacggcagcgcctggagctgtgtgctgtccacgccctcaacaacgttctgcagcagcagctctttagccaggaggctgccgatgagatctgcaagaggtgaccgtcacccaccccagcccctggagcagcagagctctggcggagtgacccacctgggtctcgccgccaggcaggcgctgagccttgggggctttcttctgctccgcgctcacttgcctaagctagacgctgggactctggggagatgttgcctcctgtgcctgtctgtccctgtggcctcagccccagccagacctcaatccagtggttctttcttttttttttttttttgagactgagtctcactctgttgcccaggctggagtgcagttgcgcgatctcgctcactgcgagctcggcctcccgggttcatgccattctcctgcctcagcctcccgagtagctgggactacaggcacccgccaccacgcccggctaattttttgtatttttagtagagacggggtttcaccatgttagccgggatggtctcaatctcctgacctcgtgatccacccgcctcggcctcccaaagtgctaggattacaggcgtgagccactgcacccggcccagtggttctttctttagagacaaggtctggctggtcttgaactcctgagcttaagtgatcctcccacctcagcctccccagtagctgggattacaggctcacccagcttcaggcatctcttatctgggccctgtcacagctctccagtccatcctaaacacgcccccgccctactcagggccctcctcatagcggaggccgagcctgcctccgcatcttcagccctcacggcccccctcaaaccagactctccactcccgtgagcccttctgtgcggcctctgggcttccaggtacttctttctgcccggcatggcttccttctctgccagcatggaatgttcctcttcactattcacaatgtccaacatcactctttggccgggcgcagtggctcacacctgtaatcccaacactttgggaggctgaggcgggtggatcacttgaggtcaggaattccagaccagcctggccaacagggcgaaaccccgtctctactaaaaaataaaaataaataaaaaataaaattagctgggcgtggtggcacatgtctgtagtcccagctactctggaggctaaggtgggagaattgcttgaagctgggagacagaggtttcagtgagccgggcaacagagcaagactgtctcaaaaaaaaaaaaaaaaaaaatcactcctttaccatctctcactccctcctctctgtccccatgtccctggccccagctcaggcctgaccctctcctgcccagcctgcccatggcctccagtctgtccctgccttcagtccccacttgatcctagagagtctttctacacctggagatggccctgcctcccctgcctcttgctccaagcctcctccggctctcggacatcttaagagtcccagcccctcagactgattattatggtatttagtcatctcctctatcattcgcaacaaggacccatcagctctttcatacaaaagccatgctggagaccctgagatgactcagacacaagtgccagcctaagggtggtgagggaaacacacacacacacacacacacacacacacacacacacacacgagcgttttcctcccatgtcctgcctgcccagggtccagatagggaacagaggtgcagctgttcagaggcagggcccagagacaagtggtgacaggcggaagagccttcctaggcaggggaagagctggaggaaaggttggcgggggtggggcgggaggcggtgggcaccggggatgtggctggggacaggggaccaggaaggagggtgctgaggctctgaggtgaggccaccagagccagaccacgcagggccttgtgggactctgtcctgggggaaatgaggcagcagagtgggctgtgagcaggggaggggtgagggcaaccccgtgggagaagcaagcagtgttaaatcagggtgatgcgggcagctgtcatcgttgaggtggctcagttcactgggggagcccagacagggccccgatccagcctggaggtcaggaggctcctctcagaggacgtgacatctgaggtgggccttgaaggacagaggaagggactggcggagggacagggactttgtccaaggcattggggagccatgggagagctgagagcaggagagggccagggccgtgtgggaatggactggagggaggctggaggctgcgggagaagacagagcccatctggggccttggggacagggcagagtcagggcaggagagacaggacttggggacagggcagagtcagggcaggagagacaggacttggggacagggcagagttggggcaggagaggcaggacttggggacagggcagagtcggggcaggagaggcaggacttggggacagggcagagtcagggcaggagagacaggacttggggacagggcagaattggggcaggagaggcaggacttgggggtggatgagttgtggggtctgaagcggggagagtcaaaggctgaggcaacttgtggcccctgggacccccattttgtggggaggcctttccaggggtccccacctcagctctggccacccccactaccaggttggccccagactcccggctgaaccctcatcgcagcctcctgggcaccggcaactatgatgtcaatgtgatcatggccgctctgcaggggctgggcctggccgccgtgtggtgggacagga

SEQ ID NO: 766 - DNA, 839 bp, Homo sapiens
cgcactcggagcccagagccgccgcccaggaaggggatgcggaaacccctggctcggtggagcggagaggcaggcggggtgaggggcgttgccaggcaaagggcgagcgccgtggctggggtgcgggtcggcgaagggctccattccttggtgtccggggagggggcctggttgctgggtgataggaagaggaactcctgttgcttagtgactggggagggggccccgttgccaggtgacaagagcagagagcctcgctgctacatgaccggggaaggggagtcttctgttgctaggagaccagaggggaccctatcacctagagacaggggaggaggattctctattgctaggtgctcggaggacagactttgttacctagtgcggtggggagggggctttgttgctaggtaaccacagagcgccctggttacctagggacggggaggcaggttcctctgttgctaggtgaccatgatagggacccttttacttagagacctggtgagggtggttttctgttgctaggggagcagaagagacagcgtttttcgtaggaataggaataagggatggagggacgtgtgctgccaggagactgccagggagcggggtcaggggcccagtgtcttcctgggctgctccgagtcccagctcaatcaatggcgatgccccaaaggcctgctgggaggctggacctctagatcccgggcccctgaggaccttctccccctcccaacccccagcaggagccgaggacggcatgtcccaggccccgggagcacagccgagcccacccaccgtgtaccacgaacggcagcgcctggagctgtgtgctg

SEQ ID NO: 767 - DNA, 6922 bp, Homo sapiens
ggaaaggacgctctatttccttcgtgtctctacctggtaggtaaatcggccgcagaaaagaccaatgctaactccaccctgcatttgcagagatccgtcgctcacaccttttcttgtcttccgttgaaaaaagagaatcgtgggagtaggacctatttgccaatctcctggtaacactatcacaactggccacttccgcccaacgcccggtagtctgagagcctccaaggtcctcccccgcacccctgaggtcctgcagacgacggcgtcgtgggtggtcaccgttatcccttaggtctggagaggggacatccgagcgagggccacttgcggccaggcccgagctcgtccagctccgggtgaccacagagtgcgcgggcgggcagaggggccggaaacccaggccgcttcgtccctgtttccgcgagcgccgcgctgctccgggagccgctgtggcagcgtatgctgccacggggactgaagatggcgccgcgaggtgagattccggaggtgtgtgagtcgctggtccctttcccttcggtcgctccctcccacctctgtcccagagcttgacctaaaccctccattctctagcgttagggacgtcgcgcctccctggtccaaagccggcttccgcggtcccgcccaccctgggtgcctgaaggtctcaaggtgcacagctcaaataaacgcagatccttggctgggccacttctaggctggctcaggtgcgaatctgttggtctctgcgccccaacttcccctcccaaatagtgacagagtgagatctttgagatgtctgtcagctgcgagttacctcttgacttttattcctgaagccgaagagtcgagtttcacggtgattcctaggaaaggagggaagccccctccactcccacccccgtaccctcgccccctcattatcagcaaccagaagtgcccctgagtggccggtcccattagttgcagcgtctagtttccccaaagttagacaccaacccatacgagcagagagggacctgccttccggcccatcccacttctctgtgctcctttttcaggtaaacggttgtcctccaccccgctggaaatcctgttctttctgaacgggtggtataatgctacctatttcctgctggaacttttcatatttctgtataaaggtaaggaaggcttggggcttgacgacagcatcccttccccacttcagctcagagccaattcctaccaagaaccttcttattttccgttcttttctgccccctgcagttctttgtcgctgcaaggcaggcctcctcatcagatggcttctttgagtatgattccataggcagcccctcagcaagaatttcttgagtttgagaaatgtgggcttctccattctgactctgcccacatcactgctctttgctgagctccactgtaagcccactggtgacccttagaaactattcagtggcctgtgtacccatgtacatccaatcattttggagagtggagtccccagagacttttggagttaggagtaaaacaccataataatgagcctgagtcgcattgtgagtttatgtatcctgctgctgtaataatgcccacatctcactaactagttcatggaaagctgagactgatgtcctcttttttcccaagtgtgtggcagttcttgtgggtgctgttatatgctgtttgcaaactctggcttttgtattggcaggtgtcctgctaccatatccaacagctaacctagtactggatgtggtgatgctcctcctttatcttggaattgaagtaattcgcctgttttttggtaagtgttgtccagagaatatttccactccttatgagacaagctggtatctgtaacttgattaacaagaaaagtacataacctaggttgactatcatagactggatctgtatatcctattactccgtctctgaagtttcaagttgctgcttcatacattgggtcaagatttacctgtttgttgctctgtaaggctagagatgggcaatagaatgggatattagatgattccttcccagctgcctaactgcaagaagagtgcttggttcttctcactagtattcttaggggaataggttcagttgtaactccacgtcagggcaggcagtgtatcctgtacagatcagtactaagatccctaacaattctctgaataaggatctctgtaggagttttttgttttttttttttgagatggagtctcactctgtccccaggctggagtgcaatggcacgatctcggatcactgcaatctctgcctcccgggatcaagcgattctcctgcctcagcctcctgagtagctgggattacaggcgtgcaccactgctcccagctaatttttgtatttttaatagagacggggtttcaccatgttggccaggatggtctcgatctcttgaccttgtgatctgcctgtgtcggcctcccaaggtggtgggattacaaatgtgggccactgcacctggttggatttttttttttttttgagatggagtctcactctgtcacctgggctggagtgcagtggcaccatctcggctcactgcagcctccgcctcccgggttcaagcaattctcctgcctcagcctcctgagtagctgggactgcaggcgcctgccaccatgcccggcaagtttttatatttttagtagagatagagtttcaccatgttggctaggatggtctcgatctcctgacctcatgatccacccgccttggcctcccaaagtgctgggattataggtgtgagccatcacacctggccagattttgttttttaaacatttatttatttgagacagggtctcattctgtcacctaggctgtagtacagtggtacgatcatagctcacagcagccttgaagccctgggctcaagcagtcctccaacttcagcctcctgagtagctgggaccacaggtgtgcgacatcatacctggctaattttgtgttttttgtagagacagtgtcttgccttgttgcccaggctggtctgaagctcctggcctcaagcaatcttcctgccttggcctccccaaggtgctgggattacaggcgtgagccaacatgcctggcctgtaggacaagttttataaccccagaaatacagagcaaaacccttatttgttagaatatgtcatccctgaaatcaacgttaaagcacaaacttaggaacaaaattacttgcaacatataagaaaggataaaagaaggctcacataaatcactaaggaaaaaacaaaataactttaaaaattggctgggcgcagtggctcacgtctgtaatcccagcactttgggaggccgaggtgggtggatcatttgaggtgaagagtttgagaccagcttggccaacatggtggccgtctctactaaaaatacaaaaattagctgggtgtggtggcgcgcacctgtaatcccagctacttgggaggctgaggcagtagaatcgcttgaacccaggaggcagaggttgcagtgagccaagatcgcccactgcactctagcctgggcgacaaagtgagactcaaaaaaaaaaaaaaattggtaagggacattaatggcagttcatgtaaaaataattacagagaaccagtaaaacttgacaagatgctcaaactcgctaataaaaatcaaattgaaacaaagtaacattttttacccatcagactggcaaagaaagatttataacacccagtattagggtgtggggaacaggttgttatacacttttgtggtaatttaatttagtacaactcttgggtagtagttattactgtgtaatgttttactgttagccccaacaatttcacttctaaaactagattaaaaaaaaattccacagatatgcgaagatagctatatgagaatgtttattgccaaaaatttggtaacatcaaaacactgtaaacaaactaaacatctgtccatacgggattgttaaatcagttacggcactgattcaacggacttgtatataaccattaaaaaagaacagttgctgggcatggtggctcacgcctgtaatcccagcactttgggaggctggggcaggcagatcacgagttcaggagatcgagaccatcctggcccacatgatgaaaccccatctctactaaaaatacaaaaattagctgggtgtggtggcacgtgcctgtaatcccagctactcgggagggtgaggcaggagaatcacttgagcccgggaggcggaagttgcagtgagccgagattgcaccactgcactctagcctggcgagagagctagactctgtctcaaaaaattaaaaaaaattaaaaagaacagttaaggccaggtgcagtggctcacgcctgtaatcttagcactgtgggaggccgaggcgaacggattgcctgaggtcaggagttcgtgaccagcctggctaacatggtgaaatcctgtctctactaaaaaatacgaaaatcagctgggcatggtggcgggcacctgtaatcccagctacttgggaggctgaggcaggataatcgcttgtacctgggaggtggaggttgaagtgagccgagatcgctccattgcactccagcctgggtgacaagaaactccgtctcaataaaaaaaaaaaaaaattagctgggcatagtgacgtgtacctatagtgggaagatcccttcagcccaggggttcgaggctgcagtgagctatgatgatgcaattgcactccagcctgggtgacagaattaaacactatcaaaaaaaaaaaaaaattaaggtagctatgtgtgtggaaaaatgtttgtgggggaaaaataagttgcaaaacaggatgtagggtatgcttctatttttataataataaatagtaatatgtgaatatatacgtataaaaaatctgaaacaatacacgtcattctctaataatcttcagggtgtagggacatggaggtctttcactttctatagtctcaaaaattattttctgtgttgaaatttttttttttttttgagacggagtcttgctttgttccccaggctggagtgcagtggcgtgacctctgctcactgcaagctccaccttccgggttcacaccattctcctgcctcagcctcccgagtagctgggactacaggcgcccgccaccacgcccggctactttttttgtatttttagtagagatggggtttcaccgtgttagccaggatggtctccatctcctgaccttgtgatccacctgccttggcctcccaaagcgctgggattacaggtgtgagccactgcacccggccattgaaaatttttaaatgattatatattatttttataattaaaaattttgtttttcccaaataaagatcccattgtcccttgagtgggaaccagactggaagcaggacctctggattaagtgactttaatcttgtagctctcctaagcctcaaacttttagtacagtgggaccccatttataaatctgcacacccccactcaggattattttttgtgccttgccattccatcacatctcccacgcctttcccctgggccaggaaaagcagaccatttggagatgactcccatgggctgtgtctgacaggtacaaagggaaacctctgccagcgaaagatgccgctcagtattagcgtggccttgaccttcccatctgccatgatggcctcctattacctgctgctgcagacctacgtactccgcctggaagccatcatgaatggcatcttgctcttcttctgtggctcagagcttttacttgaggtgctcaccttggctgctttctccaggtactgctgctgagggaccatttctcatcactagagggttgggttcccatcccagggagggattcagtattcttctgaagcctaaggggtctagaagacttttttctagagggaggaaggggtggctatgggattgcctttcctgtttagggtaggtagatcgtttcccactcagggaagatactctccctatcctttggggccaggaggcttggaatatagaacagtcgaggccagctgctctcattcactggtcttttaacattttctttctttctgccatcgtatggacaggatttgaagtacagaatttcagccagcagcccatcaggctgacaccacacatattgcttctggtactttagccacaccagtgagaattggtggggcaagttgtcctgagaaaggctgtgtggcttttcttcagcacagacatttgggcaagcaactcagcataaggccagtgggtaccatcttctaaaccaggaccatcagcccaagagactcttctacactccagtatagggaggggcaaggttattcccatcctgccccttctcagaaccagtcccctgctgacctcaagttctcctccttgatcaccgtggccagagcatctcgtgtggaccatctaggctccttgggcttcaagcaggacctgagccacatgctccctgtacgagctgtgctatacctgtcccacatgagcacggagagcctcatgttggtgggtttccagagtgatgtgaaagcctctcaccccaatcctcggagactgagttccacaacttttttagtagctcatagtgttatttttctactctcttcatgaaactaactttattttataataaatatgtattttctgttgtgggggttgcagcctttccttatggcacctgtccctagaattcatccactccaagagagggtcatgactatcccagcagtttgttctcaggagctttgcttagtgatacagtgtggacaaaaggcagtgatgaccactgattttcttccccaagctgcagcctaaattaaaccctaaatgcactgccatcctctgtatcttcaagtctctcgtcatgcaaaagactgcttatttgcttcactct

SEQ ID NO: 768 - DNA, 412 bp, Homo sapiens
gagcccaggaggtcaagactgtagtgagctatgtttgtaccactgtactccagcctgtgcaggagtgagaccctgtctcaaaaataaaattttgagtcaacataaaaggaacacttttttttttttttaagctggagaactgtcactctagatcaatgtatactttctttctccaagtaagcatctttaaaattattcctcatttccttggtagtggccatgttttttaattccaagaagccacgaggagccatgacggaatccacttcagaaaaccttgaggctcttctgttttcagatgaatcctagattatctgctcttactcgaagtaaaatgtaactttaagcattctatgctggctttaactcttactttctatgatcaagctcattcttatcctgaggggctctg

SEQ ID NO: 769 - DNA, 1431 bp, Homo sapiens
ccctaatcagtttaccatttcccgccgcgggggtaaggcctcagatgtggccctcccccgtggcagcagcccctcagtgctggctgtgtctgtcccagcccccaccaatgtgctctccctgtctgtgtgctccatgccgcttcactcaggccagggggaaaagccagcagcccctttcccacgtggggagctggagtctcccaagcccctggtgacccctggtagcacacttactctgctgaccagggctgaggctggaagccccacaggtggactcttcaacacgccaccacccacacccccagagcaggacaaagaggacttcagcagcttccagctgctggtggaggtggcgctacagagggctgctgagatggagcttcagaagcagcaggacccatcactcccattactgcacactcccatccctttagtctctgaaaatccccagtaggcatctgccaagaagggtgctgaaggctccagccagctgtcctgggtttccgttttggttccctttcatacagagggttttctatggatcactgccaaacattgggatcatctcctctgtccagaggtcttcaacaggaagatgccagctggcaccactgcactgtgatgggggccctctcctctgctgactctgccgtttctccaggcctccgctcagtgatgagaccaagagatcggagacaagcatggtgctgctgcttctgctgcttctccagaaaatccctgggacacctttgttccagcctggtttcctgggctgggctcaggaaagctgccaaattcagtcctatgttgggtccaagctgcccctgtgctgtttctgtcaagccaggtgtggacattccaagttcatatgcgtgaacaaaagaaaagaggaacccagtggatgtaacagaaccgactccagttgaatgtttagatttttgctaaactgttttctttttcccttttttgctgtggtttgcattcacggcagtagttagcccaggtgtggggaacgagagtgcactgcatgatagcgttctggtgagctgggaaggacccaccactgccactgaggattgttttggaagaaaggaatatttttatcttggggaccagctaagtctctgcagtagtgtgaaattccaaatggttgttttatcattggtttggtttaccaaaaaaaaggcagggaaaaaaaaaaaaaacaaccgtatgagcgcattggcttgtctgccgcaggcacagaagggtagaaagccacagcagggggcagtccagcagactctgactcaactttctaggcacctagcagagaaagataagatcaaaaggtgtttggtttttcttttaatttttattgtagtttttttgggtgggtgggggaagtaaactagactgaagcgatggattttttttttcttttttttcttt

SEQ ID NO: 770 - DNA, 2935 bp, Homo sapiens
ccctaatcagtttaccatttcccgccgcgggggtaaggcctcagatgtggccctcccccgtggcagcagcccctcagtgctggctgtgtctgtcccagcccccaccaatgtgctctccctgtctgtgtgctccatgccgcttcactcaggccagggggaaaagccagcagcccctttcccacgtggggagctggagtctcccaagcccctggtgacccctggtagcacacttactctgctgaccagggctgaggctggaagccccacaggtggactcttcaacacgccaccacccacacccccagagcaggacaaagaggacttcagcagcttccagctgctggtggaggtggcgctacagagggctgctgagatggagcttcagaagcagcaggacccatcactcccattactgcacactcccatccctttagtctctgaaaatccccagtaggcatctgccaagaagggtgctgaaggctccagccagctgtcctgggtttccgttttggttccctttcatacagagggttttctatggatcactgccaaacattgggatcatctcctctgtccagaggtcttcaacaggaagatgccagctggcaccactgcactgtgatgggggccctctcctctgctgactctgccgtttctccaggcctccgctcagtgatgagaccaagagatcggagacaagcatggtgctgctgcttctgctgcttctccagaaaatccctgggacacctttgttccagcctggtttcctgggctgggctcaggaaagctgccaaattcagtcctatgttgggtccaagctgcccctgtgctgtttctgtcaagccaggtgtggacattccaagttcatatgcgtgaacaaaagaaaagaggaacccagtggatgtaacagaaccgactccagttgaatgtttagatttttgctaaactgttttctttttcccttttttgctgtggtttgcattcacggcagtagttagcccaggtgtggggaacgagagtgcactgcatgatagcgttctggtgagctgggaaggacccaccactgccactgaggattgttttggaagaaaggaatatttttatcttggggaccagctaagtctctgcagtagtgtgaaattccaaatggttgttttatcattggtttggtttaccaaaaaaaaggcagggaaaaaaaaaaaaaacaaccgtatgagcgcattggcttgtctgccgcaggcacagaagggtagaaagccacagcagggggcagtccagcagactctgactcaactttctaggcacctagcagagaaagataagatcaaaaggtgtttggtttttcttttaatttttattgtagtttttttgggtgggtgggggaagtaaactagactgaagcgatggattttttttttcttttttttctttagtgtttttccctttgttcttgaacacttttgccctgcagcctcagttttgaattcttttagcaacttggattagaggggcccatatgtcagaagctcccagcacctcctacttgggagaaaagtgagccatctgctggtcaggaagtcctccagagaggcagcttttcccacaatggtggcaggaaactttggggaaagcaggaatggtgtccactgctgcggaggaactgccttcagagaaggtggggctgcaaaagggttagaagcctcctagctgggattgtctttgtttcacctttctttaaattagaattacagaagcccctgcccagtgaacagataacgattggtcttatgctcctccctttcccccattttttcttttgctgttttgttttttgttttttgtttgtttgtttgtttttttgagacagagtcatgctctgtcacccgggctggagtgcagtggtgcgatctcagctcactgtaacctccgcctcccgggttcaagcaattatttgcctcagcctcccgagtagctgggattataggcacccgccaccatgtctggcttttagtagagacggggtttcaccatcttggccaggctggtcttggaactcctgacctcgtgagccaccacgcccagcctcttttgctgtttcattgctgacagtgttcaacaatatgccccatctttatatatcctaagaaacactaatcctaggttattgctagccaaaatatttttgtcctgagtagtgtcactgggccaaaagatagatcaggacgacagcctttagttttcctgaaatcaccaggtcaggcacaaggagaaaaggttcctggatactgactaacttgggtgggtctagccaggagaaagacagtaacatgtgttctgtactttctgggaagatccctgaagccatcacagaggctccccaacttctgagtcgcccatctgttgctgtgggagtgtgaacggatcgctgaaggagagggagctttgctctctctaggtgggcaagtttcctgggctctctgtgttgcctccctctggcttcttcctcccgtgccctctccccgtgtgccccagggggatcagggatcctcaccctcctgaggcccagtggggaagaatgaacatggcttcatccaggttaactgatgctgccatttgcccagcctcttccatcccagccctgtcagtgagcccaggtctggtgcaactgctgcaggatgcctgtagtagggaactctggaagtgtattgggctgaggtgggattttccctccccacagtgcactgagcaatggagggtggtgagggagccatgctgctgaattctggttggcatttccccattatgtaaaatggggtgttgggtagggcagactctgcttgggtttggttgtaagataaacctggaggagaagcacagttgtcccattgaattatttgagcaaaaactactgcaaataactcttttgacttttgtc

SEQ ID NO: 771 - DNA, 11992 bp, Homo sapiens
ggcggaggttgcggtgagccaagatcatgccattacactccacctgggccacaagagcgaaactcggtctcaaaaaataaaaaaataaagaaaacatttttcatggacccatctccccgcaagatgttaacctgaatcatttttatcatatcacttaggtaaaacataaaactgggtatatatataaaaaaaaaaccacttctttttgcttttgttcttatacctaaccttaaaatcaaactgtttccaaagtagataaatgtaaaaaccgtgacattccacctgactgtgttaactgaaaatggtgggtggtgctttgctgactgcactgcaggatgtggtgtggcaaaggcacagactcagcagagtagatctggatggtcttaggccccgatgctcctactggtgatgaaaatggaaacccaaagccaaacatccttctagagaactggcgaacccctcaaggtgacacatccacaggtcccacctggagaaatgtaaatgtaaggaaaggaaactgggcatcccctggagggaggggacccgtggtggccacctgctctagagtcatgccgagagttaagagcagtggggaccacccagccctccttgatggaaactgaccatgaatcccatgtcagccccagctgcacacctgtctggtaactcctcccagttagttcattgccctcagctcatttggtcaattaccagctcctgtacaaataccccttaaatatttcagggttttggcttctttcctaccctcatctaaaccatcattatctgatcacaatcatttatcactccccaacttaaaacccttcaggccaggcatggtggttcgtgcctgtaattccagcactttgggaggctgaggcaggcagttcgcttgaggccaggccaggtgttttgaggccagcctggttaacatggttaacttcttcaatactaaaaatacaaaaatagccgggcatggtggtacatgcctgtaacccctgctactcaggaggctaaggtacaagagtcacttgaaccaggaggacgagactgcagtgagatcgcaccactgcactccagcctgggcaacagcaaaactgtctcaaaaaaaaaaaacaaacaaacaaacaaaaaaaaccttcagtggtctggcagggtaactcatacctgtaatcccagcactttgggaggctaggatgggagactttcttgagcccaggagttcaaggctacagtgagctatgatcatgccactgccctccagcctaggtgacagagcaagaccctatctctaaaaagaaaaaaaaaaaaaaggctgggcactgtggcttatgcctgtaatcccagcactttgggaggccaaggcgggtggattacctgaggtaaggagttggagacctacctggccaacttggtgaaaccttgtcctactaaaaataaaaaaaattaggctgggcgcagtggctcatgcctataatcccagcactttgggaggttgaggcgggtgggtcacctgaggtcaggagtttgaggccagcctggccaacatggcgaaaccccgtctctactaaaaatacaaaaattaaccaggtgtggtgctgtgtgcctgtaatcccagctacttgggagactgaggcaggataattgcttgaacctgggaaacggaagttggaatgagccgagactgagccaccgcactccagccggggcaacagactgagactctgtctcaaaaaagaaaagaaaaaaaaactagctgggcgtggttgcaggtacctgtaatcccagctacttaggaggctgaggcaagagaattgcttgaactcgggaggcagaggttgtagtgagttgtgattgcaccattgcactcctgcctgggcaacagagcaagagtccatctcaaaaaaaaagaaaaaaaaattcaatggcttttgccagcctaatgacatcaccggcccgtgtctacatcttgaacctcaaccctggtcccctacattcccactacattgatccacctccccagaccattttcctcccacccctgaccaggaggctcccagtccctaaaggagctgtatgctctcacagcagatagatgaggtcacagcactgggacactaaactgtaattgcttttagactgcaccaaattctagaggtgtggagagcactgacctagtgttcacagttacagccctagtgtagcatagtgcttggtatctggtaggtaggtgctcagtaaataatgttgaagtggcagaaaagggctataaagtggtggaagggtcaacaggcaggacctcagaagtaaggaaatgtaatggctcctaatcatgaaaaatagcctaaagcctgggagcatcattttttcctgtatttattaattaattttttttttttttgagacggagtcactctgtcgcccaggctggagtgcagtggcgcaatctcagttcactgcaacttctgctgcccaggttcaagcaattctcctgccccagcctcccgagtagctgggattacaggcacctgccaccaggctgagctaatttttgtagttttagtaaagacagggtttcaccattttggccaggctggtctcgaactcccgacctcaggtggtctcacttcagcctcccaaagtgctgggattacaggcgtgagccactgctcccggcctcctgtatttaattttttaaatttcattttccattaaggacatttaagaatatctataaaagctgaacgcaggctgggcacagtggctcacacctataattccagcactttgggaggccgaggcaaacggatcacctggggttggaagtttgggaccagcctgaccaacacggagaaaccccatctctactaaaaaatagacaattagctgggcatggtggcgcatgcttgtactcccagctactcaggaggctgaggcaggagaatcacttttgaacctaggaggtggagattgccgtgagcgagatcctgccattgcactccagcctgggcaacaagagtgaaactccatctcaaaaaaaaagagaaaaaagctaggcacagtgtctcacgcctgtaatcccaacactttgggaggctgaagcgggtgtatcacttgaggccaggagttgtagaccagtctgaccaatgtggtgaaaccccgtctctactaaaaatagtcccagctattcgggaggctgaagcaggagaatcacttgaacccgggggtggtggaggttgcagggagccaagatcatgccactgcactccagcctggtctacagaacgggactctgtctttaaaaaaaaaaaaaaaaaaaaaaactccacaaaagtaagagaatataataatcaaccaccagcaccagtcactcggcttgaacaagtatcaacattttgccaagcttgttttatctctccctggggacatctcttttgattgtctcctttaaccctcccaggagcgattcattagcaagtcaatgactcaactaactggtttgctggtacttgcctggggctaggcagttgggagggttagggaaaaaagtagtttgtaaaggattttcacaggtcccttcgacatcctctaagcccaatttattggttggactagatctgtggctacctggcagggttctgggccccaatcctttactgtaacaatggttggggatataccacgtgccaggcccgggactctgtgctgggtatacagtggtagaatgggtaccttcccattacttcctggctgtcaggactcctttcatatgcagtttcctgagggaagccttcccaaagcccataccggggcaggggcagcagtccccctggcgagggctgttgggtgagaaaggaacctggtgcagaggctgtagtggtcagctgtgggggaggagtgtcctggcctagcccccagggcagccagggatgtaggagctgctctcctctggctccaaagctagctgccctctgattcctcccacaggcaacttctatttttccccatctcaaggcctttcatctgtgtgtatgttttttgaacttctgtgtaagctttttggcttaaataaagggcttggcctgcaaggacaagtaaccagtaggctaaaccattggttcctaagcctgggcggccagactttctgggtagctggtctgaaaacacattgccaactccacccctcacccccactagatcaataaagcagagggggaaatcactaacagtttttaaaaatctctcccaggctgggtgtggttgctctgcctgtaatcccagcactttgggaggccaaagcgggcagatcacttgaggtcaggagtttgagaccagcctggccaacacggtgaaaccctgtctctattaaaaatacaaaaattacttgggcatgttgtcgtgtgcctgtaatcccaggtacttgggaggctgaggcaggagaactgcttgaacccgagaggcggaggttgcagtgaactgagatcgcaccattgcactccagcctgggcaaagaagtgagactccatttccccccccccaaaaaaaaaaatctcccctaaggtgattctaatacagagagctgccttcaagagcacctggatatggtagtctcagtgtgaatggtggtaccatgatgtttgggaaaggcgcctcagtgcctttgcttccttgacacaaaaatgagagggtttctgcctgcattcattagctgctgctcccagcatcacagcctttgtcagcctcctggtgttcctcccacccccatttgccacagtgattcctcccttgttcctcagcagcctctcagatagagccctgttttatggtagagaccggctttccggttcccagcctgtgttttgccatatacatcacagagttcactttgaccttcttcctaccatctccccaaggaccttgagtggagacaagtcacaggttcttttcctgacttaggcacaggctgggcagctggaagggctgcagaaggggcactggcagccactcagtccccccgcgttgccttgcccagcccctcagctgtgcatttttctgggctaagaagacaaaacagacagatgctaggctgccaagtgatctggacaggacagtcttgtgggggagtgtgtggaggggtgtttttctgttcttgaaccctcagccaaagtgggaagtgcctttaggggctaggtgcccacacagatgctgagaaatgcccagactgccctccatgaggctgcctgctcaacaacactccttactttgcttgacccaggtcactgtgacctgcccatttttcccctgcatccagggctgaggtggagaggggcagtgtactcctgcagcacaggtatgggaggaggcagctgtgggagggagggagagaaggacacaggcactgctcctgtgcaaggaagactccctctcactcttcagctggcagtggggtggctgcccagaaccaggctgtctggatcaaacccagcttttgcacttgtgaccttcaacaagtttctgaacctctccgatctgtttcttcaagggagatcatcatataacctgtgtgataggctgagattgaatgaataattagatatgaaatgtgaatagtgcctgaggccaggcgtggtggctcacacctgtaatcccaacactttgggaggctgaggtgagcagatcatttgagttcaggagtttgacaccagcctggccaacatggggaaaccccatctctacaaaaaataccaaaaaaaaagtacctgggcatggtggcacatgtctgtggtcccagctactcgggaggctgaggtgggagaattacctaaacccaggaggtcaaggctacagtgaactgtgattccaccactgcactccagcctgggtgacagagtgagaccctgtctttaaaaaaaaaaaaaaaaagcacagcaaagcagtggaggccctaaagccaggaggcctggttttaaatcccagctctgcactgggaagatgtgtgactggacaagagctttcttctcattgagctcagttctctctagtactttggggacactgccctctaccctccaggcttgtatgcagattaaacataatgcaagtgaggtggctggcatgatactgctatcaaaggtgtttgagtaagtttgttcccttccttcatcccacctagctgttgagcccttccttcttttttttttttttttttttttttttttgagatggagtcttgctttgtcgcgcaggctggagtgcagtggcgcaattttgactcaccgcaacctctgccttgtgggttcaagcagttctctcagcctcctgagtagctgagactacaggcacatgccaccacaccctgctaagcccttcctctctttagggttttcccacagctctagtcaggattcagctcaaccagcgtccactgaagcctgttggtatgtgtgtgcattggagcaccatagtggtgaagaggggcaaataaggaccccagagccagggcccctcctggctggaatggaatgggagagaagggccacagaagcttctggctctgccctgcctatgagccttccagcccgacagcctggtgctgtctttgagtcacctgtggaatagatgcagctgcagttagctaggttaggagaaaagacaggaccagaagaaggacctagagtgtgaaatttcagtcaagccaccgtttagaccacttaatggttttccatggtgctctggcctggttgtcagccctgtccacctctgagctcatcagctaccattcaccggttccttaagccaaccctttcctgcctcagttcagttgcattggaggaccatagaggtgaaggagggcagatgagaaccccacggccagggcctttccttggaattgtctagaacattcttagctttctgtatggctagctcttctaatccttatgtctcagccttccagaacccttagctatgggagtttctcttatctttataatgccccctttattcttgtttctgttgggggcttgttggtggttattcacctaatggttaatagtcagtctccatgactaggtgcactataagctccacagggtggagtgcatgtctgtttaattcacaaaggcatcccagcactgagaactgggcccaatataccaggcactcaaataatatttgaatgagcaagaagccttgaagagcagcaggaaggtgagaagctctaacttgacttttttttttttttttaagacggagtctcactctgttacccacgctggagtgcaatggcgtggtcatggctcactgcaacctctgcctcccgggttcaagcagttctcctgcctcagccccccaagtagctgggactacaggcgcgtgccaccacacccggctaatttttgtatttttagtagagacggggtttcactatgttggccaggctggtctcaaactcctgacctcgtgatctgcccacctcggcctcccaaaatgctgggattacaggcgtgagccaccacgctcgaccgactttttttttctttgagacaaggtctcacgctgtcacccaggctggagtacagtggcacagtcacagctcactgcagcctcaaactcctgggctcaattgatcctatcacctcagcctcgcaagtagccgagactacagacacgcaccaccatacccagctaatttttgtactttttgtagacacagggttttgccatgttgaccaggctggtctggaactcctgagcgaaagccatccgcccaccttggcctcctaaagtactgggactgcaggcgtgagctgcagcacccagcctgactctccaggctggagtgcactggcattatcacggctcactgcagtctctgcctccctggcctcaggtgatcctcccacctcagcctcctgggtagctggggctatagggcacatgccatcacaacagctgatttttttgtatttttgtagagatgtggtttcaccatgttgcccaggctggtctcgaatccctgggctcaagtgatctgcccacctcggcctcccaaagtgctggaattacaggtgtgagccaccgtgcccagccgggggagggtcttcatgtccgggctctggagtctggacttgatcctgtaggcagtaggagacaaatggcagtttgcaacctcctcctcccaggttcaagcaagtttcctgcctcagcctcctaagtagctgggattgtaggtgcctgccaccatgcccagctaatttttgtatttttagtagagacagggtttcactatgttggccaggttggtgtgtgttcttatttaactctgtcttcccactatgaacctctgtgttttcttccatgttctggggtcctgagacatagtaagtgcttcatagctgtttgttttggtttgttttgaaacagtatcttgttctattgcctagactggaatccagtggtgcgatcatagctcattgcaggctccacctcttgggctccagctatcttccgatctcaggctcccaagtagttgggaccacaggggtgcaccactacacctggctaacttcttttgtagaaacagggtctccctgtgttgcccaggctggtcttgaactcctgggcttaagcaatcctcccgccttggccacccaaagtgttgggattacaggtgtgagccactgtgcccagcccatagctgttttagattaagcaaattgatcggtcttgtatattcattccagatatgtaactggttcatcaatgcccggcggcggcttctcccagacatgcttcggaaggatggcaaagaccctaatcagtttaccatttcccgccgcgggggtaaggcctcagatgtggccctcccccgtggcagcagcccctcagtgctggctgtgtctgtcccagcccccaccaatgtgctctccctgtctgtgtgctccatgccgcttcactcaggccagggggaaaagccagcagcccctttcccacgtggggagctggagtctcccaagcccctggtgacccctggtagcacacttactctgctgaccagggctgaggctggaagccccacaggtggactcttcaacacgccaccacccacacccccagagcaggacaaagaggacttcagcagcttccagctgctggtggaggtggcgctacagagggctgctgagatggagcttcagaagcagcaggacccatcactcccattactgcacactcccatccctttagtctctgaaaatccccagtaggcatctgccaagaagggtgctgaaggctccagccagctgtcctgggtttccgttttggttccctttcatacagagggttttctatggatcactgccaaacattgggatcatctcctctgtccagaggtcttcaacaggaagatgccagctggcaccactgcactgtgatgggggccctctcctctgctgactctgccgtttctccaggcctccgctcagtgatgagaccaagagatcggagacaagcatggtgctgctgcttctgctgcttctccagaaaatccctgggacacctttgttccagcctggtttcctgggctgggctcaggaaagctgccaaattcagtcctatgttgggtccaagctgcccctgtgctgtttctgtcaagccaggtgtggacattccaagttcatatgcgtgaacaaaagaaaagaggaacccagtggatgtaacagaaccgactccagttgaatgtttagatttttgctaaactgttttctttttcccttttttgctgtggtttgcattcacggcagtagttagcccaggtgtggggaacgagagtgcactgcatgatagcgttctggtgagctgggaaggacccaccactgccactgaggattgttttggaagaaaggaatatttttatcttggggaccagctaagtctctgcagtagtgtgaaattccaaatggttgttttatcattggtttggtttaccaaaaaaaaggcagggaaaaaaaaaaaaaacaaccgtatgagcgcattggcttgtctgccgcaggcacagaagggtagaaagccacagcagggggcagtccagcagactctgactcaactttctaggcacctagcagagaaagataagatcaaaaggtgtttggtttttcttttaatttttattgtagtttttttgggtgggtgggggaagtaaactagactgaagcgatggattttttttttcttttttttctttagtgtttttccctttgttcttgaacacttttgccctgcagcctcagttttgaattcttttagcaacttggattagaggggcccatatgtcagaagctcccagcacctcctacttgggagaaaagtgagccatctgctggtcaggaagtcctccagagaggcagcttttcccacaatggtggcaggaaactttggggaaagcaggaatggtgtccactgctgcggaggaactgccttcagagaaggtggggctggaaaagggttagaagcctcctagctgggattgtctttgtttcacctttctttaaattagaattacagaagcccctgcccagtgaacagataacgattggtcttatgctcctccctttcccccattttttcttttgctgttttgttttttgttttttgtttgtttgtttgtttttttgagacagagtcatgctctgtcacccgggctggagtgcagtggtgcgatctcagctcactgtaacctccgcctcccgggttcaagcaattatttgcctcagcctcccgagtagctgggattataggcacccgccaccatgtctggcttttagtagagacggggtttcaccatcttggccaggctggtcttggaactcctgacctcgtgagccaccacgcccagcctcttttgctgtttcattgctgacagtgttcaacaatatgccccatctttatatatcctaagaaacactaatcctaggttattgctagccaaaatatttttgtcctgagtagtgtcactgggccaaaagatagatcaggacgacagcctttagttttcctgaaatcaccaggtcaggcacaaggagaaaaggttcctggatactgactaacttgggtgggtggatctagccaggagaaagacagtaacatgtgttctgtactttctgggaagatccctgaagccatcacagaggctccccaacttctgagtcgcccatctgttgctgtgggagtgtgaacggatcgctgaaggagagggagctttgctctctctaggtgggcaagtttcctgggctctctgtgttgcctccctctggcttcttcctcccgtgccctctccccgtgtgccccagggggatcagggatcctcaccctcctgaggcccagtggggaagaatgaacatggcttcatccaggttaactgatgctgccatttgcccagcctcttccatcccagccctgtcagtgagcccaggtctggtgcaactgctgcaggatgcctgtagtagggaactctggaagtgtattgggctgaggtgggattttccctccccacagtgcactgagcaatggagggtggtgagggagccatgctgctgaattctggttggcatttccccattatgtaaaatggggtgttgggtagggcagactctgcttgggtttggttgtaagataaacctggaggagaagcacagttgtcccattgaattatttgagcaaaaactactgtaaataacttttttgtcttttgtcaaataaaatttttttttgtttttttaagcagaaacagggttcttgattgatccaccagggctcagggcccaggcttgaagacaaagcagtcactggcttcttattttgctttacatcttttactctccctctagtagccagctgtgagttctgtgcacgctgtacccccattccctttcaccagctccattctgtatcccattcaactcagggtaaagggggcatttgcatctcacattgg

SEQ ID NO: 772 - DNA, 1487 bp, Homo sapiens
attctcctccctcagcctcccgactagctgggattacaggcgcccgccaccacgcccagctaattttttgtatttttagtagagacagggtttcaccatgttggccaggctggtctcgaactcctgaccttgtgattcacccgcctcagcctcccaaagtgctgggattacaggcgtgagccaccacgcctggcccagactttggatagttctgaagaggcaaggaatttaatgttgtcaaagtctaggtgtcatccttaactttggaggccaagggaagatgagaaggcatcgagcatctaggattcagcccccagccccaacgcagtattggacggcgacttggttgaaaggggcagctgtaatttgcagtgtggttaagagatggggcaggatcacagtccaggaaagggcagaagtcagaggttctgtgttcataatccagttctgcctcacgtcttgatttccttatctgtaaaggggcagggggtacacagagtcttcccctgcctggtggatctgttgtgacgaatagattcagaactggatgtgaaagtgctttgcaaaccatgcacatgaacacactcaaaagatagccttatcccctttttgtcagagtgcaaagtactgtcccctttgaatcgcgcctattgctgacccgcaggtgtctttgttctgctttcctggagcagaggcgggggaccctgaaccaccattgctttgcctccagtttgcctctccccttcctggagacacacagtaggcccttagcctaatacaagaggcccagccctgccctgctggcccccactgctcccttcctgagccagtcaaacctctcccacaagctctcctgtttctctttccccctctgtcctttcatagcttattactccaacctttgatgctgtctctccctccttcccttatcccactctgaacctcccacgtcttcctagctcctatctttcttccatgtagagacatggtaagtattttagccctcagaactcctgtcacctgactttatactctgggcaatggttaatccaagtctctgtatgagaaaggctctaaagttacagatcctgactcagattccatcttctccacaagaggaaacctggaccttggccaggtcactgccttctctgtgagcctcattattccctcatctgaaaaaagggaggtgattgtagcactttcatgagtgtagggagaaagggacgagaagaagaattcaaggctcactggggcccttcacagtggctcacacctgtaatcccagcactttaggagaccaaggtaggaggatcgcatgcgcccaggagtttgagaccagcctgggcaacatagggagaccccatctgtacaaaacaaaaaaattagctgggcatggtggtacatacctgtagtctcagctacttggggggctgaagtgggaggaaggattacttgagccctggaggtggaggctgcagtgagct

SEQ ID NO: 773 - DNA, 115 bp, Homo sapiens
tagtagagacggggtttcaccgtgttggccaggatgatctcgatctcctgacctcgtgatccacccacctcggcctcccaaagtgctgcaattacaggcgtgagtcactgtgccc

SEQ ID NO: 774 - DNA, 475 bp, Homo sapiens
aacctatgcacatcctcccacgcacttcatctctagagtaatcacagcacctaatacaatgcaaatgctgtgtcaacagtcgtactctattgtttagggaataatggcaagaaaaagtgtggacctgttcagtatagatgcaatttttttcctaaatattttcaatgggtggttggttgaatccatgaatgcagaacccacggatatgaagggccgagtctaagagataaaatagcagctagagaatcctatgttccaccgtctcattcatgaaaggggatgtggggttaattttagaaatataaaaatattccagtagtgttgtgtctattgacattcaagacagtgccgaagtcaccctctgaccctcccgcctcttgtgttggtgaactagagggaggaaggccaacaggcttttccataacaaagaagactaggaataggatgatctcactggaagcagaatcctaaagct

SEQ ID NO: 775 - DNA, 8559 bp, Homo sapiens
gaacttctcacctgagggctgtaaagactcgtttgaaaatggagagccaagaaccaacggaatcttctcagaatggcaaacagtatatcatttcagaggaggtataacttgtttttcactttcccttccctcccccacataaatctgagtttagcagaaatatatagactgttgttacaatggtggtctttcattcttgaagacagttgtaaagatttttcctactcccttttttgggctcgggcacattttgctcttgtgtgggaggagtagtgtgtctctctgtgtattagtgaaattgagactctaggagatttgggctcttaacagaaaaattcttaatccttcctgtatttccctagatagaagaagaaagaatatatgcatttgcggactcagatatttcatatgtagttgtcacaacttggctgttgatggcctaacatgagtgtttaagaacaataaaaacctacgttgttaattgtagtctaaattccagtgaattctagaaccaatgtatgtctctgtgttattcaatttagctttaaaagtctcttcctgcaggaaccattgcagtggataaattttaaatccttcatcttggatctctgatcttgacacctttctggaattccttttggtttaaaatctttccatgttgtctgtgaacagatctgctgaaaatgattaggttgctgctggcaagaagtgaaagataggatagtaggagaaaggctactgctttatacgcagtgacgctttcctctcagttcagtatagtgccgtaggtaagttagtctccaacaccagaactccccagtgtctaggcagaacgaacctggggtgtccatctgtggttgggtgggaaacccacgtgtcatgataggagatccaatcctggatggaccctgtttccccacagtccgccttcctgtgtcatcactgacaggaaaaataccagtgtctagaaatggccatttctacatatgaaactcacctgtgttgtatgcacccaggtcaggggacagaccatcaggagcgtcccaggacaccctcaccccatgtgctcccttccagttacctccatgccccaccccttcccccagcccccaggagtttttagactgtcatttcttttcacctgttaactactaccagccaagaaatttcaaaaagaagcagaagtgccctttaaaaaaacaaccctgaatacctacctactctgaactgaaaaacgtgcccacagattattgggaaggaaagatgattattgggagtctggggaaagacagaggaaatgtgaaagaaaaacccttttagataaaaacaacttggtttgaaagtttcccaacttattatctgatatccttttagttaatttcagaaggaaaatgggtcaagcttgaaaaaacaacgtacatggatcctactggtaaaactaggtaaactttttttttttcttacaaaatgttcgttatttgggttctcaggttatctgttgagtgttttgcataaactttgatgttttcttttttgtaaactctgttttaaataatctgatttagctgtttttccagtgttaggatgtttgcatcatttatagttgctgaataaaattgggttgtaaatgtgttacaataactaatcagaaaactattttaataccattctccctaagtagacaagtgtagacctaaaacttttgggccaaacctaatttaagctgataaggtgacagaataattaacagtacatgttgcttccttctagtaaaatctgtttttaatttctaaattagaagaaataaagagaaaacaacaacattgctaattttgaggtacgtgcctgcctcatggaaatgcaaattgggaaaaaaacattttgtacaccctatttcataatatgtgtcagtagccctaaagatactgtaccctttgaccgagtaatcccagttttaacaaagtgttaagggccaggtgtgttggctcacgcctgtaattccagcactttgggaggccaagggtgggggccggggcggggggcatcggttgaggtcaggagttcaagaccagcctaggcaacatggcgaaaccccatctctgctaaaaatacaaaaaatagctgggcctggtggccctgtaatcccagctacttgggaggctgaggcaggagaattgcttgaacccgggaggcggaagttgcagtgagctgagatcacaccacagcactccagcctgggtgacagagtgagactctgtctcaaaaaaacaaaaacaacaacaacaaaaagaaagtattaagtaaattagcattcagaattaaatttatgtatagaaaatgttcaccaaaattttaaaagaaaaactgaaagcaacctaaatatcttaaaaataggaaatgaattgttatagtgtattcccttggtaaaatctctgcagccgtctaaaaagcagattctgaagacaacctagcaatatgggaaaagctcctaagttgataacaaagtagaaaagtatgtatatgcttttcaaactctgccaaataacgtgtaagaaaaagccggaaggaaaattatagcaaaatgggaaaaaagctgtgtggttaaccttttttcttttactttccagatttttgcatagcaatcttttgatattataaactataagaagaaaatactatgaaaattaattttttacttagtgaaatttaaatggagtacaacagaatgaggatgaaatttagtaaccagatcacgtgataaaaattcatcagtatgagaactccatttgcaaagtgatccaataagagtacatgatttctttgtgatgaaatagatcgtcaagatgcaaatacatgggcttgccagtcatctgaacaactgtgattatatctactaaactagcaaagcccttaataaggcctaatgtgggagagctgtaggaaacatgttaagagatagatagcactgctgaattaaaacccagcagtaagaaagctaagcacagtatgatccaccaaccatgaaagactgtaactcttcacttaagatgccaagtgagtttgatatggaaaactaaatgtacaaaataagtagggcccaaacccgatacagaaatgtggcaaggcccaagtcttagggagcaccatatgttcaaatgtatttatatttgtgaaactatagagaggttggaacccaatgtatagtgatacagtttggttctcttttgcctgtcaaattaagtttataacacaaaacatagccctcaactctaatgagtctaaacatgtgtttgaggccaagcgcagtggctcacgcctgtaatcccattactttgggaggccaaggtgggtggatcacttgaggtcaagagttcgagaccagcctggccaacattgtgaaaccccgtctctactaaaaatacaaaaattagcccagcgtggctggcatgcgcctgtaatcccagctaccccggaggctgagacaggagaattgcttgagcccgggaggaggtggttgcagtgagccgagactgcaccactgtactccagcctgggcgacagagcgagactccatctcaaaaaataaaaataaaataaaaagatgtgttcgcgccagctcatctcttcgcctgactggtcttctgcccttcctgcatttcctaatcagggatgtacatcagaatcatatggggacttttctgaaaatacgacgaaatctcacttcagaatatctatttcagtagattgggagtaggctctaaaatccaccaaactaccatatttatagcatggtcatgtccattcttccatacatagggtttttttcctggcctctgaagaggatttatgtaaagcactaatattttataccagaatgtcaccctttgaagaatgagtctttgtactttcctgtatgccacgatgtataatttataggatgtgttatctctgacctgatataaaagcctgcgtgtacaggttgagcagccctaatctgaaaatctgaaattcaaaatgctgcaaaatccaaaaccttttcattgccaacatgatgccccagctggagaattccacacctgactctgtgtgacaggctgcagtcagaacacaggcatacaacacagacattcagtgtccccccaggggaaaaggaaccctccccttcagctcagctatatccttctttttttttttttttaccctgagacagagtcttgttctgttgcccaggctagaagtgcaatggtgtggtctcagctcactgcaacctctacctccctggttctagcaattctatctcaggccactcgaagtagcctgggaactagaagggtgccatgacacaacgtgggaccctgggcctggatctctctttggttaacttttcctttattaagggtttaaatgacaaagtggccccaaggctggcttttgcttctgggaccccatggtaatggtacgctgaaacctcctgaacctcaggtgatccacccacctggcctcccaaagtgctaggactacagtcgtgagccaccgcatccggccatatcctttttttttaaatttatttaatttttatttttttagtagagacagagtctcactatgttgcccaggctggtctcgaacccctgaactcaagcagtcctcctaccttggcctcccaaagtgctggggtttcaggcgtgagccaccacacccggcccgatatatcctttgcacgcacacggcgacttccctctgcaggtactcccacagagggtcatgaaatggcatgtgtgcagaccggatgcccagcagcagttccccacaacaccctacacagggctgagacctatgtgcatgactcattgtggggttctttggcttatttcctgctctgtggggtaaagatactgttcaaaatgtcaaaaaggcctgcatgacacccagagggtaaggcaaatatttcaaaatctgaaaaaccaaactctgaaacacttccggcccctcgtttcgggtaaggaatactcaacctgtacagctgtcacttggtgtctgtcggggttggttccaggaccccctgcagataccaaaatccacagatgctgaagtccctgatatgaaaatgcagatactcagtatgtatttgcctctaacctatgcacatcctcccacgcacttcatctctagagtaatcacagcacctaatacaatgcaaatgctgtgtcaacagtcgtactctattgtttagggaataatggcaagaaaaagtgtggacctgttcagtatagatgcaatttttttcctaaatattttcaatgggtggttggttgaatccatgaatgcagaacccacggatatgaagggccgagtctaagagataaaatagcagctagagaatcctatgttccaccgtctcattcatgaaaggggatgtggggttaattttagaaatataaaaatattccagtagtgttgtgtctattgacattcaagacagtgccgaagtcaccctctgaccctcccgcctcttgtgttggtgaactagagggaggaaggccaacaggcttttccataacaaagaagactaggaataggatgatctcactggaagcagaatcctaaagctagaagaggttttggagaaaacatactcattcctgctttttacaaaggagggaagagcctcagggaggctggagctctgggcttagctggcgggcaagtagagacgaagagctgacttccagtcagctgtgcatctcacaggccctttgaagttgttggagctctcactgggcaatcttattccgagatttcttatcaatgcgtttctgttttattgctggtgatttatggctcgttactgcttgtttccttcaccttaaccacgataatgatgctcctctttttgtttcccttattcctagtgtttgggatgggaccttcagtgcttttcccagcactgtcttcttcagtctttaggactaaccttaggaggcagcagagagagctatgccaaaaggtgttcatctcttgcaatctgtatgatttacttaccagcattgcttgttggtcagctccttgctactaacaggaatgttgggctgctgtgagttgtcatagaagtctgtttgattttcctgtgttcattttgacatatttggccttcggaatttgggtacaatgctgaaagacctacaatttccagacagtctttttgttttgttttttaaaaagcaaattaaatatttgaacaattttaatgaaaatatgacaaggtccaaattttaaggacagccggataggaagcatgagcaggagggttccgaggaggatatcttgcagctcttactatcgagatgcaggtggtaactcctttttatcccaagccccagagccacccacatgtttcacttcctttaaaagagatcctaaaattgtttgcttctccactctggtctcttaccactgcttttttctgttgtagggagaagagagtgaagggagaatgttccttttatgcctcgcccctttaaactgcataattgtgtcagtaactgggtttcctgtacaactgtgccccatgttccaaggccagaaagtagaatagcacagatgttacccaaaagctgagttgggtaacagtcagaaaccaatagctaaccaggaataaagccatacaagagagcaggactgtgctgttactcagcccactttttctagataagatctcacacatgcaaagtagggcacttgcctacatttaataattcttccattaataaatgggaaggttctaccttcttaaattgtgtgttttaggtcacatattttaaaaatcaaaatgatatgaaaatctcaatagttcacgttgtccatagtagcttttgttcctagagacggggtgagtcttttcctatggcttcatttgcattacctgcttattaatctgtcactggctgtgctccttgcccagagacataggatccaaactaaagttttctgagaaagcggcagctcacatgcttagcaggctttctgtttcgggggcacccagaaggtgaggtgtagggtggcaagagttttcgttgttaattttcagaagctataggaaagcagaattagcttctttaatgcagacgtttattgctgtggtcttcttgaccagtatcatgagtacatttgcatgcattgcatttaagaagttctggttgtacagagaaaacctaagaaaattctcttctgtagcactaatgacttttttttcttctctgcctgaacagaacttgggaatcagtgaaacgtacaaccaggaaagagcagactgcggatggtaggagtgcaaacctattccaaccctttagaaaggaagttagcacttgtgatcgtaagagggttttcaatggaaccaagttaacttctattaggatgttgtgtctttaaatctccgcttaggttttgccatactatgtaacgaaattaagctttctttataagtaacttctggcttctgttatctaagcccaaaacattgtttttgaggggaagttgttctaatgtttataactaaatgtaaatcaatatagtttgaagccacacctgtgtctagacgtgttatgacttctagaagtccttgtgtcctgttggaaggatctagatgagaggctttagtttggaaagttacttggcacaccttcatgcttatggaccacttgctttacaggttgatgaggacacggaattaattgggcaaagcctattccattcaccctcccctccaggcatgaatgccttgactgcaaagagcctacaaacaatcctgagaatcactctggtcgaggggaagttgggcactaggcttttcttatttttccatttagttttggtttccatttttgctggaagcaaacagtagctatgctgctgctgctggcttcacagataggaagctgtggggagccaggggaccctcctgggtgctttgtgttttctgaaacccagtcgtttttgtttttcttaggttttaatgaaggccaagtaacttgagaggaaaggtcttttaccctaaaactggaaaatcagtcttgctagcatttattgcagacagtggaacttacttgatttcttgctcaaagttgacccaggagcacagggatggctgtggcctcaccagtggtagggctgccacacgctggaaagtggttctgtggaaggtcagtgtagtcagaaaccttacatccttgaccctgtaggaaatgtttcgttttattccgattttagtttaagaaactgtgacaattaaacagcctttttgtttaaaaaagaaagtgtaaacaacatggaagtgatgatttttaattacatttttaaaatagcttccaatattaactgccagtattgtagattaaaacggagtttcttaaagtctggggttttcattagcttgctctaaacaatgtgctggcattgctgacctctcattagggatttccttggttccatttcctggtgacaggtgtcgcggtcatccccgtgctgcagagaacacttcactatgagtgtatcgttctggtg

SEQ ID NO: 776 - DNA, 423 bp, Homo sapiens
taaatttatttaatttttatttttttagtagagacagagtctcactatgttgcccaggctggtctcgaacccctgaactcaagcagtcctcctaccttggcctcccaaagtgctggggtttcaggcgtgagccaccacacccggcccgatatatcctttgcacgcacacggcgacttccctctgcaggtactcccacagagggtcatgaaatggcatgtgtgcagaccggatgcccagcagcagttccccacaacaccctacacagggctgagacctatgtgcatgactcattgtggggttctttggcttatttcctgctctgtggggtaaagatactgttcaaaatgtcaaaaaggcctgcatgacacccagagggtaaggcaaatatttcaaaatctgaaaaaccaaactctgaaacactt

SEQ ID NO: 777 - DNA, 495 bp, Homo sapiens
ggaagcatgagcaggagggttccgaggaggatatcttgcagctcttactatcgagatgcaggtggtaactcctttttatcccaagccccagagccacccacatgtttcacttcctttaaaagagatcctaaaattgtttgcttctccactctggtctcttaccactgcttttttctgttgtagggagaagagagtgaagggagaatgttccttttatgcctcgcccctttaaactgcataattgtgtcagtaactgggtttcctgtacaactgtgccccatgttccaaggccagaaagtagaatagcacagatgttacccaaaagctgagttgggtaacagtcagaaaccaatagctaaccaggaataaagccatacaagagagcaggactgtgctgttactcagcccactttttctagataagatctcacacatgcaaagtagggcacttgcctacatttaataattcttccattaataaatgggaaggttcta

SEQ ID NO: 778 - DNA, 275 bp, Homo sapiens
ttttgttttgtgagacggagtctcgctctatcacccaggctggagtgcagtggcacgatctcggctcactgcaacctccgcctcctgggttcaagcaattctcctgcttcagcctcccgagtggctgggactacaggcgcccgccaccacgcccggctaattttttgtatttttagtagagacagggtttcaccgtgttggccaggatggtctcgatctcctgaccttgtgatctgcctgccttggcctcgcaaagtgctgggattacaggcgtg

SEQ ID NO: 779 - DNA, 6888 bp, Homo sapiens
gatccccgcccgcgcgccgcgtcccacgtaccccgccgcgccgggcaagaagatggcgggatcagtggccgacagcgatgccgtggtggtgagtgtggcagggcgcgcgcgaggcgcccctccccgccgtcccgcactccgccgccgcctgctccagcagtgctggggtgctgagcagccgcaggcccggccggcgcccggcgtgggaaggcgcccggtacctgttagcagccgctggctgcgcgcggccggtgttaggggctggagaggctcccgggctgcggggctctgggctggggagggagtttggggaggatggcgggtagggacgcccgacagccccctctgtgccgtgcaaccgccagccaggtgtgcgcgtgggtgagtgtgtccggggcgcgcgccccgccaccgcccccgacgtaccggggattcccccttggaaatgggtcggcgcccggggctcccgagagaagttgagcacggccgctgcacttcagtcacgtcccgaaggacaggcctggcccaccgcgcttccagaagcgtttacggttggagaggggcctgccctcctccggcgtggggctctggctcttcggtggacctcgaccttgattttgatctggatctgaagggtctgcggatcttcagaggcttaactaccgggtggaaaggatgggttttgttcgggggtgatgagattatctaagagacggtgaagaggcatcatctgcagacactgtgtgcatgtggaaggctgctggattccaccacatctgtgtgggttcttcctccagccccccaaaaaagagcccatggaaagccaatctgtgtacttctatttttagaaactagatgatggccatttaaacaactctttgagctctccagttcaagcggacgtgtacttcccacgactggtaaatgattttgctctgtgtctctgcctgtaccttcctcctttctcattgctttttaaaattttattcatttgtttattgcattttccagtgggtcaggccttcagggtctgaggtcttggcttttccctaacaggctgtaaaattcatttttcttctcccacccttttcagatagttccattttgtgggcacattaaaggtggcatgagaccaggcaagaaggtgttagtgatgggcatcgtagacctcaacccagagaggtaaggcagagtctttgtcaggacagaactatcaggctgtggctgagccctgcccacttctgttgtggtttagcactcctcttcctctccttgtggacagtgttgctagttgccagtgccaagaaagtaccatgttcccatgaaacgaatatgtatgaatcccagccatcatttctccagacagctatttatatcagagattataaatataggcccacattttctctttgacccttagggaggccagaggatttttttttttttttttaatggttttgaaacatggtgccaggagcaagaactatcaagatgaataagaacccaacttaacattatttcccctggtcaatttctgtggctgtttttgagaattccgaagtggaattctctaattttagtcattttcaacaccaaagttttcaccagagcttgctttaggtaacaaaataagctggtttgacttacttctccataatctaacctctcttgaagagtagtggcctcttaaaaatggacaaacccagaggaggaagaagaaatataagcacttgggtcattttgaaatgtttttatatccaacccttaatcagtgggatgattttcttttcagctttgcaatcagcttgacctgtggggactcagaagaccctcctgccgatgtggcaatcgaactcaaagctgtgttcacagatcggcagctactcagaaattcttgtatatctggggagaggggtgaagaacagtcagcaatcccttactttccattcattccagaccagccattcagggtgagtacctcgagtgcctcggctccagccactggcaggctgataatgttcgacttacctagtgtgtgccaagaacacttgaagcagccagaatttctgcatgtccaggaaatttgtcacccaatggtgaaaaaaaaagatcaaaagagctctgtttgctgatataaattaacacttgccatagtatcttcttagttctattcaggtcatacatttaaatagacccatatttacatgtccaaattgttaagaataagtaacttttctatgtagtacccaacatatagtagatacctacccccaaatatctgattgattaatcaatactaagtacccacttattaaatattaatattaataaggttgagagctaataagtagctcttttatttgtatgacattttaaagaatatgatgatgatcatttcattttctcttgttccctttgctaatgaggccatgttcgtgtccttgtttccccctctggattaattagcctcagtctatttcatggttacaggctgtgtggctgacaaattccttcccttggggctggatgaataaagatttgctccccactatcttctgggcaggaagcacaatccaaacttttcatccaatcaagcagcattagcagccccttcctctatgaaaggcaatgccaaataagagatgcaggtagtggcacagtggcttgtgcctataatcccaccactttgggaggctgaggcaagaggattgcttgagcaaaggagttcaagaccagcctaggaaacacagcaaaaaccctgcctttaaaaaaaaaaaaattagcctgccatggtgtcacacacctgtagtcctagctacttgggaggctgagacgggaggattgcttgagcccaggaattcaaggctgcagtgagctatgtgtgcatcactgcactccagcctgggtgacagagcaaggctctgtcaaaaaaaaaaaaaataaagggaaatgcaagtagtaatggtgttaaaaaggggtcagacctagtgatgaattgtcattacaccttaacattacatcacaataatgacaactcagttaaaagctccatgttacatgtgagcccaataaaacacaactacacttaactggttacccttcatctagaaattttcaagtgcctcatgaagaagtaattctttcacttctcttcttacattctggggaaaataagaatccatgatttttgcattggtggtagaattgagatagttgcacttctagttatagtctctggaaggcacccttgacccattatctctcctcatccccttctctagaatggtgatgtccccttgggctcctcttggctaggatagtttcttagtgatgaaccttaatgcatagctcatgaatgtgagtaaccacagcttctgactgccaggaggaatataatgctcccaacagcaaaactgaagtgaaataggcccttcttggtgataaaatttagtaatataaaataaatgtgactagtatcacatatggagcctccttacatggtgaatgccaatgcttttaataaacccatcatagcacactaccagtaattgaactttatggtaaattacttgaggaaaaagcttttacacttacattctacacaggaatcagaaattttggaggtagagcccaacaatctgtgttctaacaagccctctgcaggtctcaatgcattctgatgtttgtgaaccactgaagatactgcctttctttctctaaaatgaagtattgtttgttttccccagtagcgttcattgaaattgtggattattattttgtttcttccaggtggaaattctttgtgagcacccacgtttccgagtgtttgtggatggacaccaactttttgatttttaccatcgcattcaaacgttatctgcaattgacaccataaagataaatggagacctccagatcaccaagcttggctgatttaaaccacctctatttcaaataggatcacgtgccacaactatctgactgttggtctggaagaagtgtcctagcaagatctggagacttaaaaagaaaacaaaaacaaatggcaagtttcacttaagggtggtttgcccttaagaagaaagctgttgggacaaagacaccgagccattatacccagaataaaataatacatttatgctggattttattcagaccaaactaaaatggatttgtgatgatttgtgatttggtagcaaattattcatcttttcaaagcaaggcaatgcttagaaacagaagtgctaaagacacttaaaaagccaacaacaacggtacagtgaaatcaatgcatttctgcactaaagtggaattgtgtagcacaaccaatattttagtcagggtatttacatagaatgtaggttgttcaaggtttgactttttttttgttttttgtttttgtttttgtttttgttttgcacagcataatgttaattcagattgttgaagctttcttgtagttatttatttatactcaatgtatgtattaaagaatgaacaatgtctcaagaacagcaagttgtaaacttttgaatgtataaatatcttaggtccaaggggagaaaattacatattacaattatgaaacaggtgaatttctgctttaaagaattgagattctccatacccctaaacttaggatctcttgatataaactgctgtaagtgcttttgggaaacctttgcaaaaccattttgataaaactgctttccaagttattgttggttatgtaaaattctatttacattgctttttctccttactgggaattagcacattattggcttccttaagactaattatttctctcttgatttatataatagctcattaagttgttattaatcaaaaacacaaagaggtgattgcttagacaatttttaaagtgactatagtataaacttttaaaagaataatatgaaaatgactgtggaatgcagtgtaaagcagaagcaaacggccctgaataacttacttggaagtaatttatatcaacttaagctgttagctcattgtataacttttcttatgtgaccctcaccaatatccctaagtaatgcctttggaagcttcagagtagaagatgcttcctactgtgttggctctgaggagatagtaggattagataggatccagattaggaaatgatccagttagtttatctgaaaggttaactcccaggactccaggtctttgaatccagccagtagagtgaatgcttccaattaagctgtaggtgttaccctgcacttacggaactgatcaaacaggtgactccaacaggaggttgcagtactgtaaacgtcaccgcaaggcaagggatgcttaaagtcctgggttctggactttaaaagctacattggccctggagggagggacccttggcattgctttgatcaggtagtgagggaagacagggttctggggtgggggtgtatttatatataatttaggttttgtttgtacagcatactgtgtcttgtaatgacacatccttgtcctgctttccttttttgagttttttttttttttttacacaacatgcagaggcactgaagtgaccatgtcattttcaagtgtcaagaatgtagacagtgtttcagtaccaaagtctaaaataaactaaaattatgaattttttataggtgatacatttggattcttctcaactttgaaactgtttagcacagttccattgtattatataagaagacactgtatccaacaagactggctgtacattgaaaagctttatgtaccagccaacttatttaaccatattcagcctgttccgtgggggctgttctgtggttccaggtattttcaagcctgtgattaacttctcatggcttgtcacttaaaagtccctaaatttgagagacttaaagggcaccttgaaatacatttgtggagttttgatccaacttatggtggaagagccccataggaagactgttttgagtggccaaccattcccacccactgcataattcagcagaaactagaggagcagggcgtgtactgattggaattgacacgcttattctgtctacctatcagctaactcattagcagccaagcccttaggcagcttagtgtgaaaatacaatgttaactgtttgtttctctgtgaggttagtgggaaccgcttggataagcctattgggattaatctaaatgatgtgatgatttgattcaggtatagcccaaattagtaaggggctttagctgtaaactgaaaacaatattcacaccctctcctgggcctgtaaggtctaaggtgagaatttcaggatggaaaatgcaatgtaaagcttccacaggaaagtattcgggtatgtaaggtgttatttctgaccagagccctagttctgcaataaccaaaaccaaggagtataaataacaatcaggctctgggggaatagaaagcaggctttagacaatctgtccatttctacagtaaaattggagtgagtgtgtatatctacttaaaacttaatagaagtgacttctactttttgggctattccagaagtattttaaaattattatttaaaattttgaagccccatttcaaatcttgccgaccttagttcaaagccccctgagagatcacttttagaattgaggatttgttaaaatggcaagtcatttcatttgtgttaaaaagaaaatacccaaaaggaaggagggagccctgtttgccttgagataaacggccttggcattttctggcattaatgtagaaataatgttcctatgatgacatattttcaaagaaacactttcttatttactgtgtggtgtaaaatgttgctaaatgtgttgttacattatgtcactgctgaaagtaatttgcactataataaaggaattttctacaaaaca

SEQ ID NO: 780 - DNA, 186 bp, Homo sapiens
gggcagcggcagcggcagcggcagcaagcagccccgtcggcccgggtccggggccgttctgggccgcggcaagcaccttcgccctcccagctcgcgctgcctccctcccctcccctcctcccaggctctgcctgccaggtcggcgccgggccccgggcgcgcgcgcgcgcgccccctcgtgtgtgc

SEQ ID NO: 781 - DNA, 482 bp, Homo sapiens
ctgtttcgttcatcctatggctgtctttgagatgtggggactgccctactcacactgcaaacactgttgggggatggcggcaggtgtaacttgctgccaccttaatgccatgggaggggactggcacgtggttaagagaggtcttttctgctctggttccaccctgaggagtccagtctaggaggagttggtgctggtcctaatgcctcctggcctggttccatgtggtggcaggtgccactgatgcttgtgacacatacagtgcccctgcaggtgccttatgagtgctcatccatctccttgccatccttgtctccctggctctctggaaaagaaagaagcccaccctctctgcaggggagagcaaacagcaagttggctcatccgtcattgcttatgtcacgtccaagttgtggatgaatgttcagagactgacacagccttggtcagaactgacataacaatagttcttttccctgtta

SEQ ID NO: 782 - DNA, 612 bp, Homo sapiens
gtgcttccatattattcagaactcttctaagtcattaataaatatactgaacacctgtgctagcactgatccctgaggcacctcattattaacctaattgcacagcttcatgatatttcatttaaccttgattttactatcaaacttttttcaaaccaagacatttcaaattaataataaaactttaccttgtatcttgtgatcaccatggctttataattgaatttgcacatttaaaaaattctgaatgaaatacttgaatgttcattttttaaaaaaatttcaaacaatatttatacacttgtctcccaggtattttctgaaattcgacttgtttacagtcttcttttcattgtttttcttcatcagctatttttaatatgttagggtaaagaaacaataattccatagtcacagtattgtggttttggatacaattctttttgtgagtcccaactcctcaatgctattttattgctagctggtacctccatcaaactggaacaggaaagggaaaggagatggaatgttggctgacattcctattcatcagcgaagctatcgcaagtgaagaatgaggtttgaaccttctggtttaaatcatacttatgg

SEQ ID NO: 783 - DNA, 186 bp, Homo sapiens
ttttattttatttttttattattattatactttaagttttagggtacatgtgcacactgtgcaggttagttacatatgtatacatgtgccatgctggtgtgctgcacccattaactcatcatttagcattaggtatatctcctaatggtatccctcgcccctcccccaaccccacaacagtcccca

SEQ ID NO: 784 - DNA, 5627 bp, Homo sapiens
cagggccctccatgcctttctctttcacatttgagcacttccttgctttctggcataacaaaatcaaccttctcttataggacccctagttccttttagggggcagtgatatttagaaaccaagatgtggatgctaagtctgctctttctctctgcttcttaagactgtttaacttggcattttttgtcctgagcctgtatgatatttacctccttttggagggtgaggatatctttttaaaaaattgatgcataatgtacatatttggggaatacatttgatattttgatacatgtgtatcatgtgtagtgatcaaatcagggtaattaggatatccatcacccacctcaaacatttatctttcctttatggcggaacattccaattctcttctagccattttgaactgtgtaatacgttattgttaactatagcctactgtactatcgaacactagattttatttcttctgtctagctgtatttatgtaccattaaccaacctcttttcacatcccattcctctctacacttcccagcctctagtaagcaccaatcaactttctatttccatgagatccacttttttagctcccacatatgaatcagaacatgcagtctttgtctttctgtgcctggcttatttcacttaacgtaatgacctctgtttctgttggtgttgctgaaaatgacaggattttgttttcttaatggctgaataatattccactatgtatatatacgtttcttttttaaaaatttagtttgatgaagaatttctggaaacaaaagaacagttgtacaagttgcaggatggtgagtatgaaaatgaaacaactgcctctaatactgattttcctttaagagctgctgtttatgtggaagggcaaaagtattcaatgacactgaacattcagaacagtatcctaaaaccaaaaaaagcaagagggaataaatagttgaaattgccaggaaatcacttcttattcaatagttccataaaagctggccgaagggggtgagcagttccttccgcatcccggtgaacagctcctctccatccctttcttctcccctctcccctccaatctcttcctccccctttctttctctcccttgccccttccctccttctcatctttccctacttccttcacactatctgaggcatcctggcctgcttgaagtatgcaaataaatatccccatttacatggggtactttctgaagtaaatactacacagaagtgaaatcaacgaactgccccctcccttcacctttaattcctggtcagccctgctccctccttgcccatccattatagcaggagccaccagcagacccataaagaatgcgcccatcaaccctgtgagcagcctccctcccagccaacagcagggtcctcaggcccagctggaggctcccctgtgtggtaccggctctccagggctgtaaggccaccttttgtgtgtgacggtggctggaagccactaggcatgtgctaagtactcctcttgcctctcccctcacctgctccgaatgctcaaaccctcaaggccaagctgtaccctataccggcatctctccccagggtttggtatgtggaaagtgttggattcaggtttgttaaataaaacaatgggttgtttttttaactagtgacagcaaacttggtagtaaacggtctgttctgtggctacagagtagccatagagtatacatgagccaaagagtatacatgagtctcagctagttacttaggtttcatgatcagattctctaaaaacagtgctgtccagcagaacattctacagtgaaggaatcgttctattctgcattgtccaatatggtagccactaggcaaatgtgactgttgagcacatgaaatatgtctagtgcaacttagggactgaattttaagttttaaaaattgtaattaatttaaatttagatttacatagctgcgtgtagctggtgactgctgtattggccagtgtagcactgaagaaatatcttcactacattcccctcaatcccttatcactgtggataggtatttttcctggggtgaaaatgaaaagggaacgtttataacaatgctagttttcagccttcttttttttttcgaggtagagtcttgctctgttgcccaggcgtgcaatggcacgatcttggctcattgcaacctccgcctcccgggttcaagcaattctcctgtctcagcctcccaagtagctgggacaacaggcatctgctaccacacccggctaatttttgtatatctagtagaggcggggtttcactatgttggccaggctggtcttgaactcctgacctcatgatccgcctgccttggcctcccaaagtgctgggattacaggcttgagccaccacgcctggccccttcaagcttcttttgtggctaaatctgctctcctgaatgaacttaaggttatctgtcatctggaagctttacactatttcctaaggccatgattccaccgtttcttttcattccacagagcattttttaggggttgggggacagagaagaaaagacacttctaactctgggcttccattctcaggtaaccacctgctgttccaacaagtgcccatggttgaaattgacgggatgaagttggtacagacccgaagcattctccactacatagcagacaagcacaatctctttggcaagaacctcaaggagagaaccctgtactgtggcccctctcgagtgttgtcacttgtcagcttactgatgccttagctgattagcaacctctgtagcacaccacatttactttatgtcttacatagttagtgagatcagggaacaaaaacccaagaaggtcacgaagaccagttggaacttcagtagagagagtctgagtaaaacaaaagaataggattcagatattgaatactatatctagggtgtcattgtttcagatttcaacatttttaaatgctttgatactgctttttccctttcttgcacattcactattgttaagtattaggaatgaggagctgctgtgacattcaaggcctgggagagtgagcattagattataatttgaaatcaaagcctggtccttgcaccccttagatgtatgaccctgggcaacgtgggtataagaatagtacatttctcatagtgtcatgtgatttaatgagataatggatagagagtgtttagcaccatgcctggtacactctaagcactcaataagtggtattcactatttttataaagttgaagtttgacccatacgaagagaccaaaacatggatgctggggtaaaagtggaggagtaggatgccaggagagagagcactcatgactgtcaagctgtctgatctgtgacagatttttctgagttacaactagaattgaccttatatctttgctcttaagagacaggtataggtaaatgcttctagggacttaagttgcagcatctttaaaaaaaaaaaaaaaaagcactctgaattcttagttgtggaaactgatggcttcaaagagaggagaaactgagacaactgcttttttgttttaaggattgacatgtacgtggaggggacactggatctgctggaactgcttatcatgcatcctttcttaaaaccagatgatcagcaaaaggaagtggttaacatggcccagaaggctataattagatactttcctgtgtttgaaaaggtaggtggcagagatgcctacatacacagagcaaccaaaccacaaaccacaaagaagctgccacaaacacccttttctgtccaaggattttaaaactgagcccagttgaactaacctaagcgctaatggactcctaagagcgaatagtagccacagcacaaagctggtgtcttagagccccttggactctgctaggaccacatgattcagaagtctagaaaaagtatgggctccctgcctttgttccttattgttccttgcattcaccaagttcccaccttgtgtggatacagcagaaacttcagaagatacagaaaacaaaaactacctcattcattcattcaacaaaagttgtcgaacagctgtctcagctgacatcctccctgataatttgatatgagtagaagaaccatttccattttatttatcttccctttgctctttttgtttttggttttgttgtttttctcttcttgttatatctgcttttctgagcttcaaattctttattcctgaactgggaggaacttttttagtgtttcaatgcaaacactaaagaagagggtgtgaaaatatgggaagacctatttggcaagcttcctctgaccatctttatggaactagatttaggaaaaaggagaggtattttctggggtttctgtagctaggttttatggtatctttcccacaggcactttgtgaatgtaaaataggataatgaagaaatgtggtctggaacgggcacagaggacctggtgctttggcaaaggttcactgctcattcttaggtcccaagggcccagactgtgtcagggtttcttgcaacacgcctatgaggtgagaaccgttgtcccttttacacataatgaaatgaagtcatgaagagattcagtgacctgtccaaggtaacatggccagaaaatggagagcagggttggaactctggcctctgactacaaattcaggatgcattgtactatgccactctggctccagtagctatatttgacctggaattgtgttcggagtccctgtgacacacacacttgtgcacatgcagacacccatgggcatccaagagttgactgtgaaggggatctcccctttgctactactgcttcttgcctctccctaatcacaatctattcttataagccccacacctatacgttaccctcagaatgggagtcaagatgaactcaagcttttcattttctctgttttgggacatgtaagaggaagtctaattttataattgggttgagtttatgactacacctcttgatgttctagcagcagaactgggaaataagagtgggccccttgaagatgatctatcacttagatttcttaaatcaccctgcccctccccaagcctcctgcatgcatttctgtagatacatttttggagtagatatatcctttcaaaacaccagatgctaaatccagaaataaggaattttcccttccccacttcaatgtctcattcagatccacagcagatatttaaggatgctttcatttccacaccttttttgtactttctctctctctctctcgctctctctctctctctctccccctctctctcactctctctgtcagatatagggtgcgttctcttaattgatgttatttatgaaagcatgaaatgacaaggtcatagtttcacctcttctcagatactgcactgattcaatagcctcatcactctctccatgtggaatattgtaactgatgcacaccatttccctacagattttaaggggtcacggacaaagctttcttgttggtaatcagctgagccttgcagatgtgattttactccaaaccattttagctctagaagagaaaattcctaatatcctgtctgcatttcctttcctccaggtaaataaaactatgtattagaagattg

SEQ ID NO: 785 - DNA, 10225 bp, Homo sapiens
cagggccctccatgcctttctctttcacatttgagcacttccttgctttctggcataacaaaatcaaccttctcttataggacccctagttccttttagggggcagtgatatttagaaaccaagatgtggatgctaagtctgctctttctctctgcttcttaagactgtttaacttggcattttttgtcctgagcctgtatgatatttacctccttttggagggtgaggatatctttttaaaaaattgatgcataatgtacatatttggggaatacatttgatattttgatacatgtgtatcatgtgtagtgatcaaatcagggtaattaggatatccatcacccacctcaaacatttatctttcctttatggcggaacattccaattctcttctagccattttgaactgtgtaatacgttattgttaactatagcctactgtactatcgaacactagattttatttcttctgtctagctgtatttatgtaccattaaccaacctcttttcacatcccattcctctctacacttcccagcctctagtaagcaccaatcaactttctatttccatgagatccacttttttagctcccacatatgaatcagaacatgcagtctttgtctttctgtgcctggcttatttcacttaacgtaatgacctctgtttctgttggtgttgctgaaaatgacaggattttgttttcttaatggctgaataatattccactatgtatatatacgtttcttttttaaaaatttagtttgatgaagaatttctggaaacaaaagaacagttgtacaagttgcaggatggtgagtatgaaaatgaaacaactgcctctaatactgattttcctttaagagctgctgtttatgtggaagggcaaaagtattcaatgacactgaacattcagaacagtatcctaaaaccaaaaaaagcaagagggaataaatagttgaaattgccaggaaatcacttcttattcaatagttccataaaagctggccgaagggggtgagcagttccttccgcatcccggtgaacagctcctctccatccctttcttctcccctctcccctccaatctcttcctccccctttctttctctcccttgccccttccctccttctcatctttccctacttccttcacactatctgaggcatcctggcctgcttgaagtatgcaaataaatatccccatttacatggggtactttctgaagtaaatactacacagaagtgaaatcaacgaactgccccctcccttcacctttaattcctggtcagccctgctccctccttgcccatccattatagcaggagccaccagcagacccataaagaatgcgcccatcaaccctgtgagcagcctccctcccagccaacagcagggtcctcaggcccagctggaggctcccctgtgtggtaccggctctccagggctgtaaggccaccttttgtgtgtgacggtggctggaagccactaggcatgtgctaagtactcctcttgcctctcccctcacctgctccgaatgctcaaaccctcaaggccaagctgtaccctataccggcatctctccccagggtttggtatgtggaaagtgttggattcaggtttgttaaataaaacaatgggttgtttttttaactagtgacagcaaacttggtagtaaacggtctgttctgtggctacagagtagccatagagtatacatgagccaaagagtatacatgagtctcagctagttacttaggtttcatgatcagattctctaaaaacagtgctgtccagcagaacattctacagtgaaggaatcgttctattctgcattgtccaatatggtagccactaggcaaatgtgactgttgagcacatgaaatatgtctagtgcaacttagggactgaattttaagttttaaaaattgtaattaatttaaatttagatttacatagctgcgtgtagctggtgactgctgtattggccagtgtagcactgaagaaatatcttcactacattcccctcaatcccttatcactgtggataggtatttttcctggggtgaaaatgaaaagggaacgtttataacaatgctagttttcagccttcttttttttttcgaggtagagtcttgctctgttgcccaggcgtgcaatggcgcgatcttggctcattgcaacctccgcctcccgggttcaagcaattctcctgtctcagcctcccaagtagctgggacaacaggcatctgctaccacacccggctaatttttgtatatctagtagaggcggggtttcactatgttggccaggctggtcttgaactcctgacctcatgatccgcctgccttggcctcccaaagtgctgggattacaggcttgagccaccacgcctggccccttcaggcttcttttgtggctaaatctgctctcctgaatgaagttaaggttatctgtcatctggaagctttacactatttcctaaggccatgattccaccgtttcttttcattccacagagcattttttaggggttgggggacagagaagaaaagatcacttctaactctgggcttccattctcaggtaaccacctgctgttccaacaagtgcccatggttgaaattgacgggatgaagttggtacagacccgaagcattctccactacatagcagacaagcacaatctctttggcaagaacctcaaggagagaaccctgtactgtggcccctctcgagtgttgtcacttgtcagcttactgatgccttagctgattagcaacctctgtagcacaccacatttactttatgtcttacatagttagtgagatcagggaacaaaaacccaagaaggtcacgaagaccagttggaacttcagtagagagagtctgagtaaaacaaaagaataggattcagatattgaatactatatctagggtgtcattgtttcagatttcaacatttttaaatgctttgatactgctttttccctttcttgcacattcactattgttaagtattaggaatgaggagctgctgtgacattcaaggcctgggagagtgagcattagattataatttgaaatcaaagcctggtccttgcaccccttagatgtatgaccctgggcaacgtgggtataagaatagtacatttctcatagtgtcatgtgatttaatgagataatggatagagagtgtttagcaccatgcctggtacactctaagcactcaataagtggtattcactatttttataaagttgaagtttgacccatacgaagagaccaaaacatggatgctggggtaaaagtggaggagtaggatgccaggagagagagcactcatgactgtcaagctgtctgatctgtgacagatttttctgagttacaactagaattgaccttatatctttgctcttaagagacaggtataggtaaatgcttctagggacttaagttgcagcatctttaaaaaaaaaaaaaaaaagcactctgaattcttagttgtggaaactgatggcttcaaagagaggagaaactgagacaactgcttttttgttttaaggattgacatgtacgtggaggggacactggatctgctggaactgcttatcatgcatcctttcttaaaaccagatgatcagcaaaaggaagtggttaacatggcccagaaggctataattagatactttcctgtgtttgaaaaggtaggtggcagagatgcctacatacacagagcaaccaaaccacaaaccacaaagaagctgccacaaacacccttttctgtccaaggattttaaaactgagcccagttgaactaacataagcgctaatggactcctaagagcgaatagtagccacagcacaaagctggtgtcttagagccccttggactctgctaggaccacatgattcagaagtctagaaaaagtatgggctccctgcctttgttccttattgttccttgcattcaccaagttcccaccttgtgtggatacagcagaaacttcagaagatacagaaaacaaaaactacctcattcattcattcaacaaaagttgtcaaacagctgtctcatagctgacatcctccctgataatttgatatgagtagaagaaccatttccattttatttatcttccctttgctctttttgtttttggttttgttgtttttctcttcttgttatatctgcttttctgagcttcaaattctttattcctgaactgggaggaacttttttagtgtttcaatgcaaacactaaagaagagggtgtgaaaatatgggaagacctatttggcaagcttcctctgaccatctttatggaactagatttaggaaaaaggagaggtattttctggggtttctgtagctaggttttatggtatctttcccacaggcactttgtgaatgtaaaataggataatgaagaaatgtggtctggaacgggcacagaggacctggtgctttggcaaaggttcactgctcattcttaggtcccaagggcccagactgtgtcagggtttcttgcaacacgcctatgaggtgagaaccgttgtcccttttacacataatgaaatgaagtcatgaagagattcagtgacctgtccaaggtaacatggccagaaaatggagagcagggttggaactctggcctctgactacaaattcaggatgcattgtactatgccactctggctccagtagctatatttgacctggaattgtgttcggagtccctgtgacacacacacttgtgcacatgcagatacccatgggcatccaagagttgactgtgaaggggatctcccctttgctaccactgcttcttgcctctccctaatcacaatctattcttataagccccacacctatacgttaccctcagaatgggagtcaagatgaactcaagcttttcattttctctgttttgggacatgtaagaggaagtctaattttataattgggttgagtttatgactacacctcttgatgttctagcaacagaactgggaaataagagtgggccccttgaagatgatctatcacttagatttcttaaatcaccctgcccctccccaagcctcctgcatgcatttctgtagatacatttttggagtagatatatcctttcaaaacaccagatgctaaatccagaaataaggaattttcccttccccacttcaatgtctcattcagatccacagcagatatttaaggatgctttcatttccacaccttttttgtactttctctctctctctctcgctctctctctctctccccctctctctcactctctctgtcagatatagggtgcgttctcttaattgatgttatttatgaaagcatgaaatgacaaggtcatagtttcacctcttctcagatactgcactgattcaatagcctcatcagtctctccatgtggaatattgtaactgatgcacaccatttccctacagattttaaggggtcacggacaaagctttcttgttggtaatcagctgagccttgcagatgtgattttactccaaaccattttagctctagaagagaaaattcctaatatcctgtctgcatttcctttcctccaggtaaataaaactatgtattagaagattggcctagaactcttgggccttccttcagtgtctattgtttggttggctttggggagtgtgtgtgtgtgtgtgtatgtgtaatatttttaagattctagtttggcaaatgaaatgaaagtaaggacccaaagttatttttctggtccttaaatccttcaagttgaaagatcattgaagtgtaaaatttttttttttaaggtgggatcttactatgttgcccagaatggtcttgaactcctgggctcaagagatcctcccacctcagtctcctgagtagcagggactataggcatgtgccagcacacccagctcagaaattttcatcttaattttgttccataactgcactcctggaaaaaactccatgcacagggagtttgcctcaggggactttccatagaaataaccatagagatgaggtggtctcacactcacatgtatctactgatggaatagtgggcgagataaacatcaaaacagtctcattcatcaggctatgactccctttctcagaaatagtatggtctcaagttaggaaattctaagcctgagctctgagagcaaatgaaagatgttggcaccctaaacatcaccccaaaggattcctaccattctccttctgagaattccaaggaaagacttgtgtggttcaaattatccctcagtgttattctggcaggattgatcatagaactttaaaggagagaagggcctttaaaaaaaaactcatttaatgacttcaatattcacttgaggaagtagagacccagaataaagaaatcagcagccaagctggcttaggcagtggatgcttgagttttatctagaaccttagccttttatctccaagtctaatgtgcagactgtaacttctgggccaaacctggcctgccacctgtttttatacagcttgtgagttaagaatagtttttacatttttaaatggttgaaaaaaatctgtggaataatatttaatgacacataaaaattatatgaaattcaaattctagtattcataaatttcattggtacaaagccatgcccactcatttacacaatgtcaaggttacttttgtttttctacagcagagttgagtagatctgatagagaccatatggcctgcagaacttaaaatatttgctgactggtcctttatagaaaaagcttgccaatccctgaaacagcccggatacagaccaaattgctatatgtttgaccaagttatcaaaagccaagagagatacactaactctccaaagagtaacacacatacttaaaacaattttttgccaagtctattaaatattttgatatactaatgagagcaattaccaccagttcaataagtacacccagaaaatgagaataaaaatcttcaacaaggcaataaaccaccatatcatttatgttatagtttatatttttttttcaatttttttttcatttacttttgcagacacagagattgactttccttaatttgattttattcattcagaacttaggatacttttcacctgaagtattcttttgcactgttaaaaaagttacttgtttagcagagaagggaaattagaggaagggatctgcaacttgttgagtgccagcttcattccagtcagtctgctaggcacttacatgcatttgctcatctgtcccgtcaaccccaccccaataaccctaggagatgggcttcactatctccattttacagatgaaaattaccagcttggaaacattacattctgcatagttgcaagactgtggatgactgagttgggagccacaggggagtcagggatctaagtctgtactctttccactagactgtgtggtttctgagaaacacatttagaagtactagaagtacctttggccccaaataggtgggatgctgaacccagaagtaggtagaatgctaagcttattaaaggtgaaatctaggcccggcacagtggctcacacctgtaatcccagcactttgggtggctgaggtgggtggatcacttaaggtcaggagttcaagaccagtctggccaacatggtgaaaccccatctctactaaaaataaaacaattagctgagcatggtggcatgtgcctgtaatcccagctactcggaggctgaggcaggagaatcacttgaactggggaggtggaggttgcagtgagccgagatcatgccactgcactccagcctgggtgacagagcaaaactgtgtctcaaaaaaaaaaaaaacaaagtgaaatctttccaggcatgcatatatatacatgcttgtgtacacatagacacacacctcacaggcagtaaagtacttttcattgaatggacacaaaagattttaaaagtctagggtaaatgatagagatcaaggttttttggtaaactgtagcaccaggacctattggtattttacattgatgatactataataacaacccttttttaagccccaagctttatctgcgtaaatacagttttaatctgtgatcagattgagcatcaatattttaaaacttcagaatcggacaccagatctgtgttgaatttaaagggttattcctgtgttgattaatggatttaaaaagtcacaaaaattttactatactttgataactatgaaccccagataaatcttgaaacaatacatcatttggaacaagattctaaattttggtataatatttaaaatcatacaagtagagcttaagtacgtaatgaaaagagaaaattgtcatatttatatataattaattggcataattattagggtttttgttactattagtgacgtatgtatgtttgtgtgtgtgcttaattaaggctgtgccttgcacataataggcaattaataaatagctatttaaaatgacctcttcacttttaaataaatggttttatttaaatatctttaaaaggttttattagaataattatatatgatgagcatatgcttcttcatatagttcagatttttcattagatcaaatgggcttttcttctcagttactgagaattggtaagatttgattctgtgaatgaaaaatacaatgtttttcttccattccagtttatataaatatccggtatctgagccagaggctatgaaaaaaatgcaactggctatttcctgcacatagccagaaagaggattcatttactgataggagtaaaaactctgaagaagctgaatcttaagatataaattgtaccatctagtgactttttaaagcacctttacttaagtggctcatgcattttctcccagcagatcagtgcacttcaggtggctagtctgagtggtgtttacagctaattgatcacaaccagttacagatttctttgttccttccccactcccactgcttcaaattgactactgttaaaaaacaatacaaaacaatacactggaggtgttttcagtgagttttccccttccttttttttcaccttaagtgtcataattctattttgagtatgtttttacttttgccatttctgtaaagagtgcttacctttttgtgaacctggagatttgtgtaaaccctgatcttgataccggtgattgatgacagagattgtaaataatcatagagatcagatcttaacctagccttgtccaacccacagcccgcgggctgcatgtggctcaggacaactttgaatgtggcctaacataaattcataaactttcttataacattatgagatattttgaggtttttttttcagctcattagctacctttagtgttagtgtattttatgtgtggcccagtgaagccaaaagattggacacccctgctaaacaaatgctagatttcatttctgcttggaactcttcaacaagtatttattgaacaaactttggtgggccattttgcataaccatatcttcgtagtatctaataccttttttgttagccttaaagttttggttttcctttttcaggaatacacagtgaaactaagtaatatccctacaattaagagattccttgaacctggcagcaagaagaagcctccccctgatgaaatttatgtgagaaccgtctacaacatctttaggccataaaacaacacatccatgtgtgagtgacagtgtgttcctagagatggtattgtctacagtcatgtcttaatggatcccagctctgtcatggtgctatctatgtattaagttgggtcctaagttgggtcttttgtgtcaaagagatcatctcttctagaaatatcaaccttttttgtccagtaaataattgttaggggatctttattggaaaacttttttggagaggctggtatttaagttagatctgattgggctactcatgtcctgtagccagttcatcctcataataagaatgggcaggatctcttgttctctcctgagtgtctttctactctcctgagcgtctttctgctctccttatcctgttctcttatccttatcccctccagtctctgcctaatttttagtgtttaataacaaccgaatgtctagtaaatgactctcctctgagctgtaataaataaaatggtagtaatgaatgcaatcagtgttagccaaaataaagaatttatgagtcattgctca

SEQ ID NO: 786 - DNA, 10225 bp, Homo sapiens
cagggccctccatgcctttctctttcacatttgagcacttccttgctttctggcataacaaaatcaaccttctcttataggacccctagttccttttagggggcagtgatatttagaaaccaagatgtggatgctaagtctgctctttctctctgcttcttaagactgtttaacttggcattttttgtcctgagcctgtatgatatttacctccttttggagggtgaggatatctttttaaaaaattgatgcataatgtacatatttggggaatacatttgatattttgatacatgtgtatcatgtgtagtgatcaaatcagggtaattaggatatccatcacccacctcaaacatttatctttcctttatggcggaacattccaattctcttctagccattttgaactgtgtaatacgttattgttaactatagcctactgtactatcgaacactagattttatttcttctgtctagctgtatttatgtaccattaaccaacctcttttcacatcccattcctctctacacttcccagcctctagtaagcaccaatcaactttctatttccatgagatccacttttttagctcccacatatgaatcagaacatgcagtctttgtctttctgtgcctggcttatttcacttaacgtaatgacctctgtttctgttggtgttgctgaaaatgacaggattttgttttcttaatggctgaataatattccactatgtatatatacgtttcttttttaaaaatttagtttgatgaagaatttctggaaacaaaagaacagttgtacaagttgcaggatggtgagtatgaaaatgaaacaactgcctctaatactgattttcctttaagagctgctgtttatgtggaagggcaaaagtattcaatgacactgaacattcagaacagtatcctaaaaccaaaaaaagcaagagggaataaatagttgaaattgccaggaaatcacttcttattcaatagttccataaaagctggccgaagggggtgagcagttccttccacatcccggtgaacagctcctctccatccctttcttctcccctctcccctccaatctcttcctccccctttctttctctcccttgccccttccctccttctcatctttccctacttccttcacactatctgaggcatcctggcctgcttgaagtatgcaaataaatatccccatttacatggggtactttctgaagtaaatactacacagaagtgaaatcaacgaactgccccctcccttcacctttaattcctggtcagccctgctccctccttgcccatccattatagcaggagccaccagcagacccataaagaatgcgcccatcaaccctgtgagcagcctccctcccagccaacagcagggtcctcaggcccagctggaggctcccctgtgtggtaccggctctccagggctgtaaggccaccttttgtgtgtgacggtggctggaagccactaggcatgtgctaagtactcctcttgcctctcccctcacctgctccgaatgctcaaaccctcaaggccaagctgtaccctataccggcatctctccccagggtttggtatgtggaaagtgttggattcaggtttgttaaataaaacaatgggttgtttttttaactagtgacagcaaacttggtagtaaacggtctgttctgtggctacagagtagccatagagtatacatgagccaaagagtatacatgagtctcagctagttacttaggtttcatgatcagattctctaaaaacagtgctgtccagcagaacattctacagtgaaggaatcgttctattctgcattgtccaatatggtagccactaggcaaatgtgactgttgagcacatgaaatatgtctagtgcaacttagggactgaattttaagttttaaaaattgtaattaatttaaatttagatttacatagctgcgtgtagctggtgactgctgtattggccagtgtagcactgaagaaatatcttcactacattcccctcaatcccttatcactgtggataggtatttttcctggggtgaaaatgaaaagggaacgtttataacaatgctagttttcagccttcttttttttttcgaggtagagtcttgctctgttgcccaggcgtgcaatggcgcgatcttggctcattgcaacctccgcctcccgggttcaagcaattctcctgtctcagcctcccaagtagctgggacaacaggcatctgctaccacacccggctaatttttgtatatctagtagaggcggggtttcactatgttggccaggctggtcttgaactcctgacctcatgatccgcctgccttggcctcccaaagtgctgggattacaggcttgagccaccacgcctggccccttcaggcttcttttgtggctaaatctgctctcctgaatgaagttaaggttatctgtcatctggaagctttacactatttcctaaggccatgattccaccgtttcttttcattccacagagcattttttaggggttgggggacagagaagaaaagatcacttctaactctgggcttccattctcaggtaaccacctgctgttccaacaagtgcccatggttgaaattgacgggatgaagttggtacagacccgaagcattctccactacatagcagacaagcacaatctctttggcaagaacctcaaggagagaaccctgtactgtggcccctctcgagtgttgtcacttgtcagcttactgatgccttagctgattagcaacctctgtagcacaccacatttactttatgtcttacatagttagtgagatcagggaacaaaaacccaagaaggtcacgaagaccagttggaacttcagtagagagagtctgagtaaaacaaaagaataggattcagatattgaatattatatctagggtgtcattgtttcagatttcaacatttttaaatgctttgatactgctttttccctttcttgcacattcactattgttaagtattaggaatgaggagctgctgtgacattcaaggcctgggagagtgagcattagattataatttgaaatcaaagcctggtccttgcaccccttagatgtatgaccctgggcaacgtgggtataagaatagtacatttctcatagtgtcatgtgatttaatgagataatggatagagagtgtttagcaccatgcctggtacactctaagcactcaataagtggtattcactatttttataaagttgaagtttgacccatacgaagagaccaaaacatggatgctggggtaaaagtggaggagtaggatgccaggagagagagcactcatgactgtcaagctgtctgatctgtgacagatttttctgagttacaactagaattgaccttatatctttgctcttaagagacaggtataggtaaatgcttctagggacttaagttgcagcatctttaaaaaaaaaaaaaaaagcactctgaattcttagttgtggaaactgatggcttcaaagagaggagaaactgagacaactgcttttttgttttaaggattgacatgtacgtggaggggacactggatctgctggaactgcttatcatgcatcctttcttaaaaccagatgatcagcaaaaggaagtggttaacatggcccagaaggctataattagatactttcctgtgtttgaaaaggtaggtggcagagatgcctacatacacagagcaaccaaaccacaaaccacaaagaagctgccacaaacacccttttctgtccaaggattttaaaactgagcccagttgaactaacctaagcgctaatggactcctaagagcgaatagtagccacagcacaaagctggtgtcttagagccccttggactctgctaggaccacatgattcagaagtctagaaaaagtatgggctccctgcctttgttccttattgttccttgcattcaccaagttcccaccttgtgtggatacagcagaaacttcagaagatacagaaaacaaaaactacctcattcattcattcaacaaaagttgtcgaacagctgtctcagctgacatcctccctgataattcgatatgagtagaagaaccatttccattttatttatcttccctttgctctttttgtttttggttttgttgtttttctcttcttgttatatctgcttttctgagcttcaaattctttattcctgaactgggaggaacttttttagtgtttcaatgcaaacactaaagaagagggtgtgaaaatatgggaagacctatttggcaagcttcctctgaccatctttatggaactagatttaggaaaaaggagaggtattttctggggtttctgtagctaggttttatggtatctttcccacaggcactttgtgaatgtaaaataggataatgaagaaatgtggtctggaacgggcacagaggacctggtgctttggcaaaggttcactgctcattcttaggtcccaagggcccagactgtgtcagggtttcttgcaacacgcctatgaggtgagaaccgttgtcccttttacacataatgaaatgaagtcatgaagagattcagtgacctgtccaaggtaacatggccagaaaatggagagcagggttggaactctggcctctgactacaaattcaggatgcattgtactatgccactctggctccagtagctatatttgacctggaattgtgttcggagtccctgtgacacacacacttgtgcacatgcagacacccatgggcatccaagagttgactgtgaaggggatctcccctttgctactactgcttcttgcctctccctaatcacaatctattcttataagccccacacctatacgttaccctcagaatgggagtcaagatgaactcaagcttttcattttctctgttttgggacatgtaagaggaagtctaattttataattgggttgagtttatgactacacctcttgatgttctagcagcagaactgggaaataagagtgggccccttgaagatgatctatcacttagatttcttaaatcaccctgcccctccccaagcctcctgcatgcatttctgtagatacatttttggagtagatatatcctttcaaaacaccagatgctaaatccagaaataaggaattttcccttccccacttcaatgtctcattcagatccacagcagatatttaaggatgctttcatttccacaccttttttgtactttctctctctctctctcgctctctctctctctctctccccctctctctcactctctctgtcagatatagggtgcgttctcttaattgatgttatttatgaaagcatgaaatgacaaggtcatagtttcacctcttctcagatactgcactgattcaatagcctcatcactctctccatgtggaatattgtaactgatgcacaccatttccctacagattttaaggggtcacggacaaagctttcttgttggtaatcagctgagccttgcagatgtgattttactccaaaccattttagctctagaagagaaaattcctaatatcctgtctgcatttcctttcctccaggtaaataaaactatgtattagaagattggcctagaactcttgggccttccttcagtgtctattgtttggttggctttggggagtgtgtgtgtgtgtgtatgtgtaatatttttaagattctagtttggcaaatgaaatgaaagtaaggacccaaagttatttttctggtccttaaatccttcaagttgaaagatcattgaagtgtaaaattttttttttttaaggtgggatcttactatgttgcccagaatggtcttgaactcctgggctcaagagatcctcccacctcagtctcctgagtagcagggactataggcatgtgccagcacacccagctcagaaattttcatcttaattttgttccataactgcactcctggaaaaaactccatgcacagggagtttgcctcaggggactttccatagaaataaccatagagatgaggtggtctcacactcacatgtatctactgatggaatagtgggcgagataaacatcaaaacagtctcattcatcaggctatgactccctttctcagaaatagtatggtctcaagttaggaaattctaagcctgagctctgagagcaaatgagagatgttagcaccctaaacatcaccccaaaggattcctaccattctccttctgagaattccaaggaaagacttgtgtggttcaaattatccctcagggttattctggcaggattgatcatagaactttaaaggagagaagggcctttaaaaaaaaactcatttaatgacttcaatattcacttgaggaagtagagacccagaataaagaaatcagcagccaagctggcttaggcagtggatgcttgagttttatctagaaccttagccttttatctccaagtctaatgtgcagactgtaactcctgggccaaacctggcctgccacctgtttttatacagcttgtgagttaagaataatttttacatttttaaatggttgaaaaaaatctgtggaataatatttcatgacacataaaaattatatgaaattcaaattctagtattcataaatttcattggtacaaagccatgcccactcatttacacaatgtcaaggttacttttgtttttctacagcagagttgagtagatctgatagagaccatatggcctgcagaacttaaaatatttgctgactggtcctttatggaaaaagcttgccaatccctgaaacagcctggatacagaccaaattgctatatgtttgaccaagttatcaaaagccaagagagatacactaactctccaaagagtaacacacatacttaaaacaattttttgccaagtctattaaatattttgatatactaatgagagcaattaccaccagttcaataagtacacccagaaaatgagaataaaaatcttcaacaaggcaataaaccaccatatcatttatgttatagtttatatttttttttcaatttttttttcatttacttttgcagacacagagattgactttccttaatttgattttattcattcagaacttaggatacttttcacctgaagtattcttttgcactgttaaaaaagttacttgtttagcagagaagggaaattagaggaagggatctgcaacttgttgagtgccagcttcattccagtcagtctgctaggcacttacatgcatttgctcatctgtcccgtcaaccccaccccaataaccctaggagatgggcttcactatctccattttacagatgaaaattaccagcttggaaacattacattctgcatagttgcaagactgtggatgactgagttgggagccacaggggagtcagggatctaagtctgtactctttccactagactgtgtggtttctgagaaacacatttagaagtactagaagtacctttggccccaaataggtgggatgctgaacccagaagtaggtagaatgctaagcttattaaaggtgaaatctaggccgggcgcagtggctcacacctgtaatcccagcactttgggtggctgaagtgggtggatcacttaaggtcaggagttcaagaccagtctggccaacatggtgaaaccccatctctactaaaaataaaacaattagctgagcatggtggcatgtgcctgtaatcccagctactcggaggctgaggcaggagaatcacttgaactggggaggtggaggttgcagtgagccgagatcatgccactgcactgcagcctgggtgacagagcaaaactgtgtctcaaaaaaaaaaacaaagtgaaatctttccaggcatgcatatatatacatgcttgtgtacacatagacacacacctcacaggcagtaaagtacttttcattgaatggacacaaaagattttaaaagtctagggtaaatgatagagatcaaggttttttggtaaactgtagcaccaggacctattggtattttacattgatgatactataataacaacccttttttaagccccaagcattatctgcgtaaatacagttttaatctgtgatcagattgagcatcaatattttaaaacttcagaatcggacaccagatctgtgttgaatttaaagggttattcctgtgttgattaatggatttaaaaagtcacaaaaattttactatactttgataactatgaaccccagataaatcttgaaacaatacatcatttggaacaagattctaaattttggtataatatttaaaatcatacaagtagagcttaagtacgtaatgaaaagagaaaattgtcatatttatatataattaattggcatcattattagggtttttgttactattagtgacgtatgtatgtttgtgtgtgtgcttaattaaggctgtgccttgcacataataggcaattaataaatagtagctatttaaaatgacctcttcacttttaaataaatggttttatttaaatatctttaaaaggttttattagaataattatatatgatgagcatatgcttcttcatatagttcagatttttcattagatcaaatgggcttttcttctcagttactgagaattggtaagatttgattctgtgaatgaaaaatacaatgtttttcttccattccagtttatataaatatctggtatctgagccagaggctatgaaaaaaatgcaactggctatttcctgcacatagccagaaagaggattcacttactgataggagtaaaaactctgaagaagctgaatcttaagatataaattgtaccatctagtgactttttaaagcacctttacttaagtggctcatgcattttctcccagcagatcagtgcacttcaggtggctagtccgagtggtgtttacagctaattgatcacaaccagttacagatttctttgttccttccccactcccactgcttcaaattgactactgttaaaaaacaatacaaaacaatacactggaggtgttttcagtgagttttccccttccttttttttcaccttaagtgtcataattctattttgagtatgtttttacttttgccatttctgtaaagagtgcttacctttttgtgaacctggagatttgtgtaaactctgatcttgataccggtgattgatgacagagattgtaaataatcatagagatcagatcttaacctagccttgtccaacccacagcccgcgggctgcatgtggctcaggacaactttgaatgtggcctaacataaattcataaactttcttataacattatgagatattttgaggtttttttttcagctcattagctacctttagtgttagtgtattttatgtgtggcccagtgaagccaaaagattggacacccctgctaaacaaatgctaaatttcatttctgcttggaactcttcaacaagtatttattgaacaaattttggtgggccattttgcataaccatatcttcgtagtatctaataccttttttgttagccttaaagttttggttttcctttttcaggaatacacagtgaaactaagtaatatccctacaattaagagattccttgaacctggcagcaagaagaagcctccccctgatgaaatttatgtgagaaccgtctacaacatctttaggccataaaacaacacatccatgtgtgagtgacagtgtgttcctagagatggtattgtctacagtcatgtcttaatggatcccagctctgtcatggtgctatctatgtattaagttgggtcctaagttgggtcttttgtgtcaacgagatcatctcttctagaaatatcaaccttttttgtccagtaaataattgttaggggatctttattggaaaacttttttggagaggctggtatttaagttagatctgattgggctactcatgtcctgtagccagttcatcctcataataagaatgggcaggatctcttgttctctcctgagtgtctttctactctcctgagcgtctttctgctctccttatcctgttctcttatccttatcccctccagtctctgcctaatttttagtgtttaataacaaccgaatgtctagtaaatgactctcctctgagctgtaataaataaaatggtagtaatgaatgcaatcagtattagccaaaataaagaatttatgagtcattgctca

SEQ ID NO: 787 - DNA, 548 bp, Homo sapiens
gttacaagggcacagtggcaatatatgatgctttacaaaaataccatatatgttttgtacttttaggaaaatgaaaactgcacatttgaaataaaaaaagaagatgcagctgggtgcggtggctcacgcctgtaatcccagcactttgggaggccaaggcaggtggatcacctgaggtcaggagttcaagaccagcctggccaacatagtgaaaccctgtctctactaaaatacaaaaaattagccgggcgtggtggcgcatgcctgtagtcccagctactcgggaggctgaggcaggggaaatctcttgaactcgggaggcgaaggttgcagtgagccgagatcccgccactgcactccagcctgaacgacacagtgagactccgtctcaaaataaataaataaataaataaataaataaataaataaataaataaatttcatataaatgcagattcctggcttctcctagaaaaattaggctgcctggcccccctggagccatattccatctgacaatatggcttgcccatttagctgaagcacct

SEQ ID NO: 788 - DNA, 547 bp, Homo sapiens
gttacaagggcacagtggcaattatgatgctttacaaaaataccatatatgttttgtacttttaggaaaatgaaaactgcacatttgaaataaaaaaagaagatgcagctgggtgtggtggctcacgcctgtaatcccagcactttgggaggccaaggcaggtggatcacctgaggtcaggagttcaagaccagcctggccaacatagtgaaaccctgtctctactaaaatacaaaaaattagccgggcgtggtggcgcacgcctgtagtcccagctactcgggaggctgaggcaggggaaatctcttgaactcgggaggcgaaggttgcagtgagccgagatcccgccactgcactccagcctgaacgacacagtgagactccgtctcaaaataaataaataaataaataaataaataaataaataaataaataaatttcatataaatgcagattcctggcttctcctagaaaaattaggctgcctggcccccctggagccatattccatctgacaatatggcttgcccatttagctgaagcacct

SEQ ID NO: 789 - DNA, 365 bp, Homo sapiens
ccagagtagggtcccaggcaaaacaagaagcagtgacatgtctatagttggaagcatgagagagatgaggaagagtttggttggaggcaccctgcttctggaaaaagtctggctgagtgaattgggtactgctgagaagggccctgtgggtttgcacaaaggggaaccagattgcatgtttaagtttagaagtgccatgttcagtctgggacttgaagagggtctcctatcaccttgaagagggtaattctggaaggcagcaaagaaaccgtctggatagttaaagctgagctaagtcagtcccaataggaagattgaggagcagaaagtttgggttcaagaaacagggtttaaaaagaggaaaa

SEQ ID NO: 790 - DNA, 2451 bp, Homo sapiens
ggaaggagccagagaggatctggcagagaggacgaaactgaagtccagagaagcacagtgatctgctcaaggtgacagggtcagggcctgcaccaaaactgaggtcagttgatttcactggactgaggagagaagatacagaaatgaaggcccctggggcagaggagaacctgaggtgatggaaagtcggcaagaggcgagatgcaacttacaaattaccatttttctgagggtggggcctttcctttttttgcctgtgaggatatagtagactttcaaaaaatggctctggtctgactgaaggtggggtcaggccatcaaaggaggaagaaagggccaaggagaagtgatgctagaggccgggcatggtagctcacgcctcagcactttgggaggccgaggcagatggatcacctgaggtcaggagttcgagaccagcctggccaacgtggtgaaacctcgtctctactaaaaatacaaaaattagccctgcgtggtagcgcacacttgtaatcccagctactcaggagactgagacaggagaatcacttgaacccaggaggcggagatggcagtgagccgagatcgcgccattgcactccagcctgggtaacaagagcgaaactccatctcaaaaaaaagaagtgatgctagaaagagctggacagaagggaacaccaagacacctgtccatcttcacttagccaaatccagggccctgacaagatgggttttcaccaggacattttatggggctcctggctccccactatttctgacagtaggattcctaggtctgtgtcacctgtgagacagaaggggagccacattctggtggcagggacagaaccacacgcatggacactgatgtgccatcctggtccccacaggtcccctgaccagtacagctcctagaataggtcttctctgagctggaggggataagccagactgcttcctgggagaattgaaaaggagcagggggccctgaagacagaatcagtcaggtacacagtgagcaggggtgatgtgacggtagagagacatgggaacagagacagcacacacaccacatagctctgagatgacgcacaaaatgttatgactccatagactgaagcagacacagcgtttcttttcttttctttttttttttgagacggagtgttgctctcgtccaggccggagtgcagtggtgtaatttcggctcactgcaacctccgcctcctgggttcaagtgattctcctgcctcagcctcccaagtagctgggattataggcgtgcgtcaccacacccggctaatctttgtatttttagtagagatgggattttactacattcaccaggctggtcttgaactcctgacctcaagtgatccacccgccttagcctctcaaagtgttgggattacagttgtgagccactgtgctggcctcagacacagcatttctaaggccatgttgagggtgccaaaggaaaccaagatattttaccccagaatatactactttgacgtattttgagtcggctgtcagagggccagcacacagaagtggccctgcaaatctggcttttgagggagatttgcatctgcagagaatctgcattgatgcaacctggctttctctgaggccctccctggtccaaatctaggaaagattaactgaaagtctgacatgtttaaaggtctgaaagacacatacatcacctgttttctctgaggggtgttacctatgaggtttcattcatataaaaagaccacttttacaggcctggcctccgtttatccctcccataactatttttgccaaagtccaagtcccttttttttttgttgttgagacagggtctctgtcgcccaggctggagtgcagtggcatggtctcagttcactgcaacctccacctcccagggtcaagtgagtctcatgcctcagcctcctgagtagctgggactacaggcatgtgccaccatgtccagctaatttttgtatttttagtagagacagagtttcgtcctgttggccaggctggtctcaaactcctcacctcaggtgatccacctgcctcagcctcccatagtgctgggattacaggggtaagccactgcaccttgcccaagctcccattctttctgtaacctcaagatggtataaaatcatcaaccatctggctatctctttgacttcctatatttttttgactcccttgcatattagttcttctactaatctgccttttttcagttggtttttcagcagacctgcagagggcacaggggaagtgttcctttggcccctgcagcaccacaggaccccaggtcctgtctgtggtcgtggtggtaacgggtgccagcctggaccagtcctgcatcgtggagcttcactctggacattctaaggggcagactgtggctggggcgtgagggataataaaggtggtgtgaccgaa

SEQ ID NO: 791 - DNA, 2451 bp, Homo sapiens
ggaaggagccagagaggatctggcagagaggacgaaactgaagtccagagaagcacagtgatctgctcaaggtgacagggtcagggcctgcaccaaaactgaggtcagttgatttcactggactgaggagagaagatacagaaatgaaggcccctggggcagaggagaacctgaggtgatggaaagtcggcaagaggcgagatgcaacttacaaattaccatttttctgagggtggggcctttcctttttttgcctgtgaggatatagtagactttcaaaaaatggctctggtctgactgaaggtggggtcaggccatcaaaggaggaagaaagggccaaggagaagtgatgctagaggccgggcatggtagctcacgcctcagcactttgggaggccgaggcaggtggatcacctgaggtcaggagttcgagaccagcctggccaacgtggtgaaacctcgtctctactaaaaatacaaaaattagccctgcgtggtagcgcacacttgtaatcccagctactcaggagactgagacaggagaatcacttgaacccaggaggcggagatggcagtgagccgagatcgcgccattgcactccagcctgggtaacaagagcgaaactccatctcaaaaaaaagaagtgatgctagaaagagctggacagaagggaacaccaagacacctgtccatcttcacttagccaaatccagggccctgacaagatgggttttcaccaggacattttatggggctcctggctccccactatttctgacagtaggattcctaggtctgtgtcacctgtgagacagaaggggagccacattctggtggcagggacagaaccacacgcatggacactgatgtgccatcctggtccccacaggtcccctgaccagtacagctcctagaataggtcttctctgagctggaggggataagccagactgcttcctgggagaattgaaaaggagcagggggccctgaagacagaatcagtcaggtacacagtgagcaggggtgatgtgacggtagagagacatgggaacagagacagcacacacaccacatagctctgagatgacgcacaaaatgttatgactccatagactgaagcagacacagcgtttcttttcttttctttttttttttgagacggagtgttgctctcgtccaggccggagtgcagtggtgtaatttcggctcactgcaacctccgcctcctgggttcaagtgattctcctgcctcagcctcccaagtagctgggattataggcgtgcgtcaccacacccggctaatctttgtatttttagtagagatgggattttactacattcaccaggctggtcttgaactcctgacctcaagtgatccacccgccttagcctctcaaagtgttgggattacagttgtgagccactgtgctggcctcagacacagcatttctaaggccatgttgagggtgccaaaggaaaccaagatattttaccccagaatatactactttgacgtattttgagtcggctgtcagagggccagcacacagaagtggccctgcaaatctggcttttgagggagatttgcatctgcagagaatctgcactgatgcaacctggctttctctgaggccctccctggtccaaatctaggaaagattaactgaaagtctgacatgtttaaaggtctgaaagacacatacatcacctgttttctctgaggggtgttacctatgaggtttcattcatataaaaagaccacttttactggcctggcctccgtttatccctcccataactatttttgcccaagtcccagtcccttttttttttgttgttgagacagggtctctgtcgcccaggctggagtgcagtggcatggtctcagttcactgcaacctccacctcccagggtcaagtgagtctcatgcctcagcctcctgagtagctgggactacaggcatgtgccaccatgtccagctaatttttgtatttttagtagagacagagtttcgtcctgttggccaggctggtctcaaactcctcacctcaggtgatccacctgcctcagcctcccatagtgctgggattacaggggtaagccactgcaccttgcccaagctcccattctttctgtaacctcaagatggtataaaatcatcaaccatctggctatctctttgacttcctatatttttttgactcccttgcatattagttcttctactaatctgccttttttcagttggtttttcagcagacctgcagagggcacaggggaagtgttcctttggcccctgcagcaccacaggaccccaggtcctgtctgtggtcgtggtggtaacgggtgccagcctggaccagtcctgcatcgtggagcttcactctggacattctaaggggcagactgtggctggggcgtgagggataataaaggtggtgtgaccgaa

SEQ ID NO: 792 - DNA, 351 bp, Homo sapiens
ggaaggagccagagaggatctggcagagaggacgaaactgaagtccagagaagcacagtgatctgctcaaggtgacagggtcagggcctgcaccaaaactgaggtcagttgatttcactggactgaggagagaagatacagaaatgaaggcccctggggcagaggagaacctgaggtgatggaaagtcggcaagaggcgagatgcaacttacaaattaccatttttctgagggtggggcctttcctttttttgcctgtgaggatatagtagactttcaaaaaatggctctggtctgactgaaggtggggtcaggccatcaaaggaggaagaaagggccaaggagaagtgat

SEQ ID NO: 793 - DNA, 3370 bp, Homo sapiens
aatagataggagagcaagcctcaccaatggttaccttcatctatctgcaagcccactttacactctgttctgggtggtgagtctagggatgttttgctgagcagcctgaatagcagactctagggattcccctgagatgagataaggtggtgtttgggagtaagtttaacttagatccttataccagttgtggttatgcatccacagatctctgccttctttccacaggtccagcacattaccgggacctccggaagggtgtgtatgtgccctacacccaggggcaagtgggaaggggagctgggcaccgacctggtaagcatcccccatggccccaacgtcactgtgcgtgccaacattgctgccatcactgaatcagacaagttcttcatcaacggctccaactgggaaggcatcctggggctggcctatgctgagattgccagggtgagaggaacagggcttggccctacacactctatgcacactgcactatacagagaaggaattaggagagagaaggggaattagcagaaggagggcaacatcagtttaaaggattatttaacaggggtatagggtggcagtctaaattttagccctatagagggcagaaccatagtgacagaagctgtgataggtacaagaataggctgtgctttctatgtactcttaagatctttttttttttgagacggagtttcactctttttgcccaagctggagtgcaatggtgcaatcttggctcactgcaacctccacctcctcggttcaagcgattttcctgcctcagcctcccgagtagctgggattataggcgcccaccatgacgcccggctaattttttctatttttagtagaaatggggtttcatcatgttagccaggctggtctcgaactcctgaccgcaggtgatccgctcacctcggccttcctaagtgctgggattacaggcatgaaccaccgcgaccagccactctaagatctttaataaaggcccccataaatttgaagcaggttaggcatagggggatcaaagatatatgaacctggccaggcgtggtggctcacacctgtaatcccagcactttgggaggccaaggcgagcggatgacctgaggtcagaagttcaagaccagcctgaccaacatggtgaaaccccatctaccccatctctactgaaaacacagaaattagccgggcatgttggcgcatgcctataatcccagctactcaggaggctgaggcacgagaatcacttgaacccaggaggtgaaggttgcagtgagccgagatcgtaacattgcactccagcttgggcaacaagagcaaaactctgtctcaaaaaaaaaaaaaaaatctttgattctgggaccctttcaatacggccctgttggctttgccagggctcctgctaacccttcctctgccaaatctcagtgccttaagatggtctttcccaaggagcatccccaagccttcaaatttgccttccagtttagacaggaagctggcctctgcctttagggccgtatgaggactcactccttgtctctttctgccaaagcctgacgactccctggagcctttctttgactctctggtaaagcagacccacgttcccaacctcttctccctgcagctttgtggtgctggcttccccctcaaccagtctgaagtgctggcctctgtcggagggagcatggtgagtaggtcctcagagaggggaggtcctggcattgagggagagatgggtgccatcctctccccttcctgaaagctacaccacagttttggctccgatacttagaatcaggaggaacctctttatattccctacccttactttatttttccattcttttcttttttgcgttattccagaaaggaatcaaggcacctatggtaaacttggaaaggaaggcaattaggaaaatttcaaaggaaatgaaaataagacctgttgaattaaaattattcagtttgatggtcagaaggcagagatataagaagtttgtctatttattaattaattagaacaatggtgaatggttctccaataagcagagaaaataaaacttataatataaacaaataaccattcattcaacatttattgtggcagtttagatttaaataactttatatcaagggctgtatgattctgaaacaaataattaaaaatcccggaaagtcttttctcctgaacacatttaagaaactagaaatcactttgggtatgatttgtttagaagcaggaagatgaaaagggtagcctgtagaagaccttgccaccccaagaaatcactgatcttattgcttggtccttgggggactcactctccttctgtgccaggacacgggtacctgcctctttttttccctagatcattggaggtatcgaccactcgctgtacacaggcagtctctggtatacacccatccggcgggagtggtattatgaggtgatcattgtgcgggtggagatcaatggacaggatctgaaaatggactgcaaggaggtaataaaaccaagggagagcctgggaacataagggggtaggcagtacaatgtgaaggaagactctggttatcatgttgggaggatgaggcagaggtaataggacctgcagaaagggttggaagttgagcctagaacagtcaggggcttaatggtcacacagcaggatctgcggtttggggcctagggactggtagtgaaaaaaaaaacatggaactagttctgatgtctggactctagtcactgccttgcttcgtagccttgggcaagtcttttgtgagacagggtgatagaatgaagagtcttgtctttggagtcaggaagacccagatctgaatctagctctgatttgtactagctatgtacccttaggccagttactattctgtgtctcagtttccttatctgcaaaacaggtaaaaacaactttctcagaatatcagagataatgtgtaaagtgtttatctctgtggttggcagtactcaataaaaggtaactaaatcatttatgtcttccttccctagattcttatgtatgttaaattagaatagatataaatgtactaagaaaagttaaaagcggccgggcgtggctgtaatcccagcactctgggaggccaaggcgggggcagatcatttgaggtcagaaattcgagaccagcctggtcaacatggtgaaaccccatctctactaaaaatagccaggcgtggtggcaggcacctgtagtcccagctacttgggaggctgaggcaaaagaatggtttgaatccaggaggcagaggttagagtgagccgagatcacgccactgtactccagcctgggtgacagagctaatactccatctcaa

SEQ ID NO: 794 - DNA, 3369 bp, Homo sapiens
aatagataggagagcaagcctcaccaatggttcccttcatctatctgcaagcccactttacactctgttctgggtggtgagtctagggatgttttgctgagcagcctgaaagcagactctaggattcccctgagatgagataaggtggtgtttgggagtaagtttaacttagatccttataccagttgtggttatgcatccacagatctctgccttctttccacaggtccagcacataccgggacctccggaagggtgtgtatgtgccctacacccagggcaagtgggaaggggagctgggcaccgacctggtaagcatcccccatggccccaacgtcactgtgcgtgccaacattgctgccatcactgaatcagacaagttcttcatcaacggctccaactgggaaggcatcctggggctggcctatgctgagattgccagggtgagaggaacagggcttggccctacacactctatgcacactgcactatacagagaaggaattaggagagagaaggggaattagcagaaggagggcaacaatcagtttaaaggattatttaacaggggtatagggtggcagtctaaattttagccctatagagggcagaaccatagtgacagaagctgtgataggtacaagaataggctgtgctttctatgtactcttaagatctttttttttttgagacggagtttcactcttgttgcccaagctggagtgcaatggtgcaatcttggctcactgcaacctccacctcctcggttcaagcgattttcctgcctcagcctcccgagtagctgggattataggcgcccaccatgacgcccggctaattttttctatttttagtagaaatggggtttcatcatgttagccaggctggtctcgaactcctgaccgcaggtgatccgctcacctcggccttcctaagtgctgggattacaggcatgaaccaccgcgaccagccactctaagatctttaataaaggcccccataaatttgaagcaggttaggcattagggggatcaaagatatatgaacctggccaggcgtggtggctcacacctgtaatcccagcactttgggaggccaaggcgagcggatgacctgaggtcagaagttcaagaccagcctgaccaacatggtgaaaccccatctaccccatctctactgaaaacacagaaattagccgggcatgttggcgcatgcctataatcccagctactcaggaggctgaggcacgagaatcacttgaacccaggaggtgaaggttgcagtgagccgagatcgtaacattgcactccagcttgggcaacaagagcaaaactctgtctcaaaaaaaaaaaaaagatctatgaatctgtgaacctatcaatactgtcctgtttgcattgccagggctcctgctaacccttcctctgccaaatctcagtgccttaagatggtctttcccaaggagcatcccccaagccttcaaatttgccttccagtttagacaggaagctggcctctgcctttagggccgtatgaggactcactccttgtctctttctgccaaagcctgacgactccctggagcctttctttgactctctggtaaagcagacccacgttcccaacctcttctccctgcagctttgtggtgctggcttccccctcaaccagtctgaagtgctggcctctgtcggagggagcatggtgagtaggtcctcagagaggggaggtcctggcattgagggagagatgggtgccatcctctccccttcctgaaagctacaccacagttttggctccgatacttagaatcaggaggaacctctttatattccctacccttactttatttttccattcttttcttttttgcgttattccagaaaggaatcaaggcacctatggtaaacttggaaaggaaggcaattaggaaaatttcaaaggaaatgaaaataagacctgttgaattaaaattattcagtttgatggtcagaaggcagagatataagaagtttgtctatttattaattaattagaacaatggtgaatggttctccaataagcagagaaaataaaacttataatataaacaaataaccattcattcaacatttattgtggcagtttagatttaaataactttatatcaagggctgtatgattctgaaacaaataattaaaaatcccggaaagtcttttctcctgaacacatttaagaaactagaaatcactttgggtatgatttgtttagaagcaggaagatgaaaagggtagcctgtagaagaccttgccaccccaagaaatcactgatcttattgcttggtccttgggggactcactctccttctgtgccaggacacgggtacctgcctctttttttccctagatcattggaggtatcgaccactcgctgtacacaggcagtctctggtatacacccatccggcgggagtggtattatgaggtcatcattgtgcgggtggagatcaatggacaggatctgaaaatggactgcaaggaggtaataaaaccaagggagagcctgggaacataagggggtaggcagtacaatgtgaaggaagactctggttatcatgttgggaggatgaggcagaggtaataggacctgcagaaagggttggaagttgagcctagaacagtcaggggcttaatggtcacacagcaggatctgcggtttggggcctagggactggtagtgaaaaaaaaaacatggaactagttctgatgtctggactctagtcactgccttgcttcgtagccttgggcaagtcttttgtgagacagggtgatagaatgaagagtcttgtctttggagtcaggaagacccagatctgaatctagctctgatttgtactagctatgtacccttaggccagttactattctgtgtctcagtttccttatctgcaaaacaggtaaaaacaactttctcagaatatcagagataatgtgtaaagtgtttatctctgtggttggcagtactcaataaaaggtaactaaatcatttatgtcttccttccctagattcttatgtatgttaaattagaatagatataaatgtactaagaaaagttaaaagcggccgggcgtggctgtaatcccagcactctgggaggccaaggcgggggcagatcatttgaggtcagaaattcgagaccagcctggtcaacatggtgaaaccccatctctactaaaaatagccaggcgtggtggcaggcacctgtagtcccagctacttgggaggctgaggcaaaagaatggtttgaatccaggaggcagaggttagagtgagccgagatcacgccactgtactccagcctgggtgacagagctaatactccatctcaa

SEQ ID NO: 795 - DNA, 591 bp, Homo sapiens
gagtaggataaagtctaatctcctaaaccctttaattctgactctaaggaccctccacaatctgctcctaaatgactatttttcaccttatctttcactacttttcacctctgttcttcgatttcttttaggcctgcctacttactctgttctgggcttttgcatgagtcattctgcatgtttaggacaatttcacactatctgtaaatgacagcccagccccctgatcccagacacacactcaaacccagctacagtgatgtgtctcatctctgaattattgtgggactttgtgctataacactatcatttgtaccactcatttcacacatcatattctccactttggttttaattagcattttatgtgtctatatgtctgacctccttaacttcccataggtgaagatcatccatgtctctttccatttatgttttatatctgaaagaatgcaccagatggtgctttatactttgcatttctcgtcacctctctaatttagggccctccctaccccttgataggagtgtgggaatagtctcttgacttgggctattctccttacagtttcttgcaaggttttcctaaaa

SEQ ID NO: 796 - DNA, 591 bp, Homo sapiens; identical to SEQ ID NO: 795

SEQ ID NO: 797 - DNA, 266 bp, Homo sapiens
cctaccctcagactgaactctatgaagaaatgggctgtgtctttttttctatacagacccagggcctagcccactgccatatttaataaacaaatgtatcgaccatttgtgtcaacaaatatttttattttttactttgatgagtgaatctcctggccttgtgtgaatttcatcttacagtgaagattattactaggagttctaatctctttcaaggtctacatatccattgcacatcaattttcttcttgaaagctcccagattt

SEQ ID NO: 798 - DNA, 266 bp, Homo sapiens; identical to SEQ ID NO: 797

SEQ ID NO: 799 - DNA, 300 bp, Homo sapiens
tagaaactctccgggagggaaacagcattttgtgtcttaacaagccctccaggacactctgatgcaccccccacccccggcaagactgagaaacactgacccagaggttattcctctaggtcttaagtagatatttgtaatagatatgctcagaaactaacagaatctccatttagtttcctgaaccacgtagtatgaggtattctggtaggaatcaaaatctgaaagccattttggaaatttcagaagtcattaaagacctgaaagatatcaggatagtgataatgaaaacaatgtaac

SEQ ID NO: 800 - DNA, 177 bp, Homo sapiens
gaaaccccgtctctactaaaaatacaaaattagcctggcatggtggtggacgcctgtaatcccagctactcgggaggctgaggcaggagaatggcgtgaacccggcaggcggagcttgcagtgagccgagatcccgccactgcactccagcctgggcgacagcgagactccgtctca

SEQ ID NO: 801 - DNA, 533 bp, Homo sapiens
ggggatggatgccaaggccacttacatccatcaccacgtcagggctttgcaccgaggttgtgtaactgttggcctagccagacctcaccatggggaaaccaagcaggaggaagaatccacttctctgtctttctcagtgggtactgagtaacacagtgggccacgtgttggccaggtgctgagaatccacaggtgaacctgaccctgtcccagactcctgactcctcaaggagctaaacagccttcaaattaaaaagcctcaaatcagcagataacccaacagcgaccagttgatactcaggcagcagtcagcccgtcggcgagtgctggaaacgcaggatttacactgatgacgtacacagtgtgtgccacttgggcctgggaggattgacagcacggtcacagacggtcatccttacaggattcacaccaggtaccccctcgattctttgctgtgccaccaccctccactcactgagtcggggcccctcttggggatcctggcacagcccagaagatagaagctgattctt

SEQ ID NO: 802 - DNA, 533 bp, Homo sapiens
ggggatggatgccaaggccacttacatccatcaccacgtcagggctttgcaccgaggttgtgtaactgttggcctagccagacctcaccatggggaaaccaagcaggaggaagactccacttctctgtctttctcagtgggtactgagtaacacagtgggccacgtgttggccaggtgctgagaatccacaggtgaacctgaccctgtcccagactcctgactcctcaaggagctaaacagccttcaaattaaaaagcctcaaatcagcagataacccaacagcgaccagttgatactcaggcagcagtcagcccgtcggcgagtgctggaaacgcaggatttacactgatgacgtacacagtgtgtgccacttgggcctgggaggattgacagcacggtcacagacggtcatccttacaggattcgcaccaggtaccccctcgattctttgctgtgccaccaccctccactcactgagtcggggcccctcttggggatactggcacagcccagaagatagaagctgattctt

SEQ ID NO: 803 - DNA, 541 bp, Homo sapiens
ggcaaattggggctgggctctgcttgatggttcttctgctggtcttattcctgcagctgcagtcagttggctgttcagctgggactggacagtctggtaggcttcatttatatcttacaggtggcaggcaactgtctgggaagccttgattctcctccacctggcctctccagctggctagataccattcatatcgtggtgtgagaattcctgatgtgcaagcacttttcaggcctctaattacaccatatttgctactggcccattggccaaagcaagttacatggccagctcagttttcagagatgggcaaatagactgtaatttttgtttttttttagatagtatctcactttgccacccagggtagaatatagtggtgtgatcttggcacactgcagcgtcaacctcctaaattcaagcgattctcctccgtaagacccccaagtagctgggcatacagatgtgggccaccacgcctggctatgtttgtttgttttttgtagagatggagtttccccatgttgcccaggctggtctc

SEQ ID NO: 804 - DNA, 5446 bp, Homo sapiens
cgggtggctcgggcagaatttgggaagaatctcatccacgttccccgggccgtagaccgggcccaggctgggggggccctgctggacatcggcatctactgtgtccagttcacctccatggtctttggagggcagaagccagagaagatttctgtcgtgggaaggcgtcatgaaacaggtaccatctatcctggaatatttcatggtgatgggaatgattctgtctctctgggagcactgaactgaggacaagtctccaagtcaatgagaattagatcagacacctagaggaacaactttccatgaagccagagaggatcagagtcaagactgcaggtgggcactctcctgggactttgctgtgtgatcttagccagcagacttaacatctctgaatcttaattactttactggtaaagtgtcactaatagggttgtcatgggagttaatgaagtaactgctgaggcaaatggcagttaataaatataaaattattattttttgaagttgtctcagtgaatctttgctacaaaaaagactaccccacttggccaggcgtggtggctcacgcctgtaattccagcactttgggaggccgaggtggccagatcacctgaggtcaggagttggagaccaccctggccaatatgatgaaaccccatctctactaaaaatacaaaaattagctaggcattgcggcaggcacctgtaatcccagctatctgggaggctgaggcaggagaatcacttgaacccagggggcggaggttgcagtgagctgagatggcgtcactgtactctagcctgggcgacagagtgagactccatctcaaaaaaaaaaaaagctgccccactttgcagaagaggcccttgccttggcttccactcagctggaaagtatccaagagtgcctgagccacccagatgtgatgcccttcatctttgacctttaaccccaaggagcaagaggcagttcatgcttcattaaagttacattcagccgcaaaaaaaaaaaaacataacactaccccaaaacttagtgacttcaggctgggcatggtggctcacgcctgtaatcccagcactttgggaggctgaggtgcgcggatcacttgaggccaggagttcaagaccaccctggccaacatggtaaaaccctgtctctacgaaaagtgcaaaaaaaattagttgggcgtggtggtgtgcacctatagtccggctactctggaaggtgaggtgggaggatcaattgagcctgggaggcagaggtggcagtgaactgagatggtgccactgcattccagcctggggaacagagccagaccctgtctcctttttgtggagaacagagtctcgctatattgcccaggcaggtctcgaactcctgggctcaagctatcctcccgcctctgcctccccgagagctgggattacaggtgtggccaccgcccccggcaagccagaccctgtctcaaaaaaaaaaaaaaacttagtgacttcaaatagcaatcatttattagcttgtgattctgtgcattggcaaattggggctgggctctgcttgatggttcttctgctggtcttattcctgcagctgcagtcagttggctgttcagctgggactggacagtctggtaggcttcatttatatcttacaggtggcaggcaactgtctgggaagccttgattctcctccacctggcctctccagctggctagataccattcatatcgtggtgtgagaattcctgatgtgcaagcacttttcaggcctctaattacaccatatttgctactggcccattggccaaagcaagttacatggccagctcagttttcagagatgggcaaatagactgtaatttttgtttttttttagatagtatctcactttgccacccagggtagaatatagtggtgtgatcttggcacactgcagcgtcaacctcctaaattcaagcgattctcctccgtaagacccccaagtagctgggcatacagatgtgggccaccacgcctggctatgtttgtttgttttttgtagagatggagtttccccatgttgcccaggctggtctcgacctcctgggctcaagcaatacacacatttggcctcccaaagtgctggggattacaggcatgaaccaccggctttttttttttttttttgagacggggtctcactctgtcacttaggctgagtgcagtggcacaatcattgctcactgcaaccttgacctcccaggctccagggatcctccacctcagcctcctgagtagctaggatcacaggcacaagccaccacacccaactaaattttttattttttgtagagacaaggtctcactatgttgcccaggctggtcttgaactcctggactcaagggatcctcctgcctccacctcccaaagtgctgagattataggtgtgagtcactgtgcacagccaagactgtacttcgtgtgtgtgtgtgtgtgtgtgtgtgtgtgtgtgtgtgtgtgtgatggagtctcgctctgtcgcccaggctggagtgcagtggtgccatctcggctcacttcaagctccgcctcccacgttcacgccattctcctgcctcagcctcccgagtagctgggacgacaggactacaccacgcctggctaattttttgtatctttagtagagacagggtttcaccgtgttagccaggatggtcttgatctcatgaccccacgatctgcccacctcagcctcccaaagtgctgggattacaggcgtgagccaccgcgaccagccagcacttcattcttttgccttgccatgcaagaagtgaagtctcttgcccaaggttccacaggcaggatttggggcctgtgcagtctcagagactctgccctgagagaccctgccctgacccaggacttccctccaggtgtggatgacactgtcacggtgctcctgcagtacccaggggaggtccatggcagcttcacctgcagcatcaccgtgcagctctccaacacggcctccgtgagcggcaccaagggcatggtacaggtgaggcatggcgggcccaagcgctggggatcgtgcccctaaaataggagggggacaaatggcctctggagctagatgagagcttaaccagccaatttcacatcattgctaaagagttcctccttaaccaagccaagaggtgggttctgggcctctaggctctccttacttaggatgaacctattgctctgtcaaatattcttgggcctggctggcacggtggctcacgtctgtaatcccagcactttgggaggccaaggcaggcagatcacctgaggtcaggagttccagaccagcctggacaacatggtgaaacgccatctctactaaaaatacaaaaattagctgggtgtggtggtgggcgcctgtaatcccagctactagggaggctgaggcaggagaattgcttgaatccggaagatggaggttgcagtgagttgagattacgccattacattccagcctgggtgataagagcaaaactccatctcaaaaaaaaaaatatatatatatatatgtatccttgggcctggccggcacggtggtcacacctataatcccagcactttggaggctgaagctggtggatcacttgagccctggaggtcgaggctgcagtgagctgtgattgtgccactggactccagcctgagtgacagagtgagatcctgtctcaaatatctatctttagtcctgaggagaagccagttattatcaaccatgcttagtgggcagttgtgaatttcggaagtgcatccgggggaggatctgggtgttaccaaaggtcagcttaactggtcttcctggggccttgttgctagaaaaaaaaaaaaccctattttatagccaggcatggtgacttacacctgtaatcccagcgtgattgggaggccaaggcaggcagatcacttgagctcaggaattcaagactggcctggccaacatggtgaaaccccgtctctactaaaaaaaacatacaggctgggcgcggtggctcacacctgtaatcccagcactttggcagcccagagcgggtggatcacctgaagtcaggtatttgtgaccagcctgaccaacatgatgaaaccctgtctctactaaaaatgcaaaaattagccaagtgtggtggtgcatgcctgtaatcccagctactcaggaggctgaggcaggagaattgcctgaacccgagaggcggaggttgcagtgacccgagatcgagccattgcactccaggctgggcaacaagagcgaaactccgtctcacaaaaaaaaaaaaaaaaattagtcaggcatggtagtgggcacctgtaatcccagctactcgggaggctgaggcagaaaaatcacttgaacccaggaggtggaggttgcagtgaaccgagattgatccactgcactccagcctgggcgacagagcgagactccatctcaaaaaaaagaaagaaagaaagaaagaaaataaataagaagaaaacatggttcacagacacacaaagataagccctcctctctagaccttaagaacaccttgtttctaagctcctaaggttagggagaggtttgctcctggggagacagacaggatttttgtgtcacatcagcgttgctaaggaacaaacttctagcaactagaaatgaaggagggtccaaagctccccggggatggacagggcaagctcttagccaccaggttcaagagggaggcccctgtgcaccacctggcatgttcctggaggcagcctcagcagcaccgttggtgaaggcagcagtgccacttcttctctccctccagctcctcaacccctgctggtgcccgaccgagctggtggtgaagggggagcataaggagttcccgctgcccccagtcccaaaggactgcaattttgacaacggggcaggcatgagttatgaggccaagcacgtctgggagtgcctacgcaagggtaaggatatggatgcggggcaggcgccaggcctggtagggggatgttgggcccctccccacctgctctgtcaccctgctgtttagaactacatctcccaggaggttgcagtgagccgagattgcaccactgcactccagcctgggcaacggaacaagactctcactccaaaaaaagaactatatctctcaggaacccctgcagcatccatctgcctgaaccatgtatattgtgccacatggaattctgggaattgtagttctttgggtcttgggcgcgtgggtaggaggggtccctaactacactctccccacaggtatgaaggaaagtcctgtgattcccctgtcggaaagtgagctcctggctgacatccttgaagaggtgaggaaggccattggagtcaccttcccccaagacaaacgctgatgtatccccgaataaataaagacatcttacatcttc

SEQ ID NO: 805 - DNA, 240 bp, Homo sapiens
gtggatcacctgaggtcaggagtttgagaccagcctgaccaacatggtgaaaccccatctctactaaaaatacaaaattagccgggcataatgacgcatgcctgtaatcccagctacttgggaggctgaggcgggagaatcacttgaacctgggaggcggaggttgcggtgagccgagatcgtgccattgcactccagcctgggcaacaagagcgaaactctatctcaaagaaaaaaaaa

SEQ ID NO: 806 - DNA, 289 bp, Homo sapiens
tcacgcctgtaatcccagcacttcgagaggcagaggcgggcggatcacgacgtcaggagatcgagaccatcctgtctaacacagtgaaaccccgcctctactaaaaatacaaaaaattagccgggcgtggtggcgggcgcctgtagtcccagctactcgggaggctgaggcaggagaatggcgtgaacccgggaggcggaggttgcagtgagctaagatcccgacactgcactccagcctggacgacaagagcgagactgtctttaaaaaaaaaaaaaaaaaaaaaaga

SEQ ID NO: 807 - DNA, 1160 bp, Homo sapiens
aggctgcctcctcttggggtctgacccgcacagctggctctcaggcctctgtgttatcgtgagatggggtgtccccccaagtcaggatgaccttctacccacgtgcgtcttctctgtcttaggatgaggtgctcacgatcagccagacaaccagaagcccaaagaaggggagaggagactttaagaacccgtagggctagttagagcaccgagcctctcacttctgtcttcatcctgacaccaggagatgatgtgggcccaggggttgggtctgctgcaggccaaggagagctgacgggtcaggatgatgaagaggctggagagctagcacgggggttatgcacatcagctctggagcaaataacctcagttggtatcctggttcccatgccttaggaaagttactaaaggtcactgagccttagttcctcatctgtaagatgggaagaagattattaggaaaattaagtggaagcaataataatatcagctgttgcctctggggctgtgcttgcctgcgagccacaccaggctgcagatgacaggaaacacagtgagagctggagttgctgctgactgggtgcccctccattccagcaattccctttctgtttgatgtccgtgaacatcacccacattgccatccaggccttgagagaggagtgtctctccaggtgagtccccaaacaccagctggttagagtgacccagcaaagccttgttcgtccccactctggcttaattttccccagctctactccacctgctggctcctggagggcctggacaaagtccccatgcaccggtctccccaggacatcccttctcccacccctggccttagatgtcaggctcctggggaatggtgggggcatcctgggtttgggctggctcccctggggaaatggggaaggaaggcgggagggaacctaggtctcagccttcatccaccgctgagcaggtcaccttgcctttttcctgcagagagtgtaatcggcagcagaaggtcatccccgtggtgaacagcttctatgccgccacattcctccacctcgcacatgtctggaggacacagcggaagaccatctcagactcgggctttgtcctcaaaggtgtgctctttcttctggggaggcctaggctgaatgcacagtgtccca

SEQ ID NO: 808 - DNA, 444 bp, Homo sapiens
atgattagtgacttaactctacccagtgtggcactagcgctggatttccaagaccacctgcaggttcaatgattcctgagagactcaagggactctacgtatagttatacttaacagttctgatttagtacaacagaagcaaaatcagcaaagggaagaattacatgggacaaattccacaggaaaccaggtggtgatgtccaagaggcctctcccagtggaatcacacagaacacacttcattcttccactgccaaattgtgcaatacgtataaaatgtcaccaatcagggaagctcattagaggtacccagtactcaaggtttttaccatgacatgctggtcatgtaggcaccctctgcctagcacataccaaaactctggaatcacagagggaaagctggtgttctgcataaagtatcttttttgtgtttgtttttttgaa

SEQ ID NO: 809 - DNA, 1242 bp, Homo sapiens
gagccagggtccaatagttggactattcaaagttgcaattgtgcagacaaggtagagtgtgtggtccctgtggctgtagctggctccctagcctacctctctggtgatctctccatctgaggctccttcactttctctccatgggataggggttgggggtactccctagagctgctaggcttgaggccttgactgttgtgtcacccagagccccctcaagccttctgctccccaattctctctgttgcagagttggaagtattggccaagaagagcccacggcggctgctcaagaccctggagctgtacttggccagggtgtcaaagggacaggcctccttgttgggagcacagaagtgctatgggccagaagcccctcccttcaaggatctcaccttcacaggtgagagtgacctgcagtctcactcatccgaaggcgtatggctgatctgacctccgagatgaatggaggcttaaaggctgagctgcaggggctttcagggggtcagtggagccatgtcaggagcctggccaggccgcaccccttgctgtctcagcagatgggatataggaagctcctgggcttagctgtgggaagccaagtaccctcaccggcatgggacatgaggggcagctagacttcacccccttcccgcagacctgcctccagagcaaggagaattctgccttaatctgttgggctccagtctccgggttgaattccagtgtatcccactgggagtgaatggatcatgaggtgggatggccccatctggatgttctgcagatccccacatgggaggagattcccaagtagaggcagccagaattctgactccctggcagcagcagggctttcaggcaccagtgtctgtgttgttagaactcagaggaagaggcaggggcagcagccgacagggggcagcatgacccaagcaaggggcctgaggcctcagtgggggtagggcaaggaggtacctcacaggtgggtgtgaggccccctctggagtttctggccattcacttacccactctcttctccccctgacccccgctccattgtttatgatggaaaaacggacatttggctaggtgtctctcacggctgctccatcctagcccccacaagctggggcttcctcctgtagatgctgtgatgccccatgatgagtttctggcctaattgagggaaggaggaaattcataccagcagttttcaaataaaagaattgttctaattaa

SEQ ID NO: 810 - DNA, 503 bp, Homo sapiens
tgagattgcaccactgcactccagcctaggcgacagagtgagactgcgtcttgaaaaaaaaaaaaaaagaaaatattatatagcctcatgaatctagcactttgtgtaatagtcatttacaactaaatgaatattgaatatttcctcgacctcaatttctgtccagtgacttcaacatcaatcaatacagtattgaaagggaatctagtcagagcacatgtcctgatgctattttcccaaaggcaaggactaggtcttttcatctcctaggacacagtggctcactaagtagagcatagggaattaggggatgggtgtggaatgtgatagctgcaagagatgtttccaagcactacacatatagggcagagttcttctaggccaagaagtcggaagctccttttgcagtgcagatccgacttacttgacgactgcctaacttctggctctcacagttttattggagaatatggaatgatttcctttcatggcctgacaccttc

SEQ ID NO: 811 - DNA, 283 bp, Homo sapiens
ttggcttcttggaataagggcttattttcaggtgggaagacacatctcagtttagaggctgcagcaacccagaagaaaagtcccctaggaagcagaaagaggaaagaaccagactcagatataggaaggggcaagatgagagaaactggttggagaaattgacatactaatggttacaaagactttctgagaggaggtctcctattgtggaagactaagccaaagtaactgtttccagttatgtggcagtgttttttaaaaacactttcctagacccatgggc

SEQ ID NO: 812 - DNA, 128 bp, Homo sapiens
ccccacataccccccaacagtttgtcagctccatgagtcagggctgttagatctgtccattgctgcctatctaccagctagaataatgcctgacacatagaggacaatgaatgcttgttggatgaata

SEQ ID NO: 813 - DNA, 878 bp, Homo sapiens
gatgaacaaagcaaaacctgttaactgacctggcttttactgataaactcagtggaagcttttcgtctgtaaaatctaagtcccggccgggtgcagctgcacgcctgtaatcccagccctttgggaggccaaagtgggcagatcacctaaggtcaggagtttgagaccagactgatcaacatggagaaaccccgtctctactaaaaaaaaatgcaaaattagccgggcgtggtggcacatgcctgtaatctcagccacttgggagccaaggcaggagaatcgcttgaacctgggaggcggaggttgcagtgagccaagattgcagcattgcactccagcctgggcaacaagagtgaaactctgtctcaaggttaaaaaaaaaaaaaaaaaaaaaaaaaaatctaagtcccaagcatgtatggtggaattgaccagtgtttaataaatatcttctgaaatactagacagaattggttgcagactatgaaataatttccatgtctttatttcaacaactgcaatttttattgtctttttaggatttccaattccatgtgtccctctcttcctgccttaactgtgtctcatttccttataatgtgctctctgattactgagcattttctgcgtattttcatatgcaaaaactaattacccatctaataattatttagtggtttcagatacagacgtactataatagagtcatagatacatggaaacatttaaaatacattcaaaaccaagatgagactagccatgatttgagtaacaagcatctttaaaataatgttaaataggctgggtgcggtggctcatgcctgtaatcctagcacttggggaggccgaggcgggtggattgcctgagttcaggagtt

SEQ ID NO: 814 - DNA, 248 bp, Homo sapiens
taccccataaatatatatacctactatgtacccacaaaaataaaaaattaaaaaatatatattaatgtagaaggcacaggataagagaaatataaggttgcatcctttaggaaaatattaattctttaatgcagtagtaacaaaattccatttacacattatttattgttcatcagacagttttcattctgaagttttgctagctctgcacttctgaatgccagcctctatcccgtatctaccctacc

SEQ ID NO: 815 - DNA, 6798 bp, Homo sapiens
gcaagctctacgactcgctgctcgccctggacggtaggccccaggccggcggggtgggagatgggaggtgggaacagcaggggagtctggagcaagttttcctcacagtctgctatctgcgctgggctccaacctccagcctccgctctacaattcccccactactgccctgtgcccattgacggtccaggccagcctgctgccctgtgggaggggagggctctagggtctggcggctgtgggtccagattcctgctctgtcactataactttgaactagtcaccaaacctcttcccattgtgatgttctcatctctaaaggggaatactaatacctgtggcactctgaaagactcagttaagacccttcatccacttctccccacagtcagtagacagacacacactgtatgatgcacacctgctccctagtcctgctcccaggcctgtgtgccagcatatgggtgcatgcacatgcatgcaaacacgcatgcacacgcacacacgtgcacatgcatgcacagacaggtgtgtctgcatgcagtccctctccttctggggtgtggagatgagcctgacaggcaccgccgaagttctaactctggggtggaggtgatccacctgcaatctgcccaggagcccccagggacaatctgctccccatgggagctgggagcagagcggccttcaaccagccccattgtgccagttcaggcaggtcagttcaggcaggtcatctagcctcgctgagggacccaggtctcctgagcaccccccagggcccaggatggacccatgcacccgtgaagaggcaagcttccagctgccatgggcagaggggaaagtgactgttgtctgaatggctgctggggaggggttgctgcggggctcaggctgagttgagctgggcctcagatacccccagctcttccacctaccaaacctgaggggaccctggagctgccctcagctgcttgggaggatgggccaagcccaagagggagtccccaggccagaaagcaacagcagagtgaatcatactaccggaaaagcctgcaagggcgagtggagaatggcgttgacagtgaaggggactctcacccccacaccctgtcctcatgcccgggctgtcactcctcactatcctgcacctgccagaaggtggtctgaccccccaggccagctcctgctcaagcccctctcaagctgggctccttccaccgaccccaggcaccgacccaacccccatccccgccagcccgactcagtgtcatcccgcccaccctaggtcacatccaatcagcgcgggccctgatggtggtggccgtgctcctgggcttcgtggccatggtcctcagcgtagttggcatgaagtgtacgcgggtgggagacagcaaccccattgccaagggccgtgttgccatcgccgggggagccctcttcatcctggcaggtgagtgcccctcactcctgcacaatcacaaccatggcaggcagccccagccccagtggctcggggggccagagcagagctgagcgcccctctgctttgtctttaggcctctgcactttgactgctgtctcgtggtatgccaccctggtgacccaggagttcttcaacccaagcacacctgtcaatgccaggtgggtgccagggcttgggtcttttgctttacctcctctggggccactgacctttgtccactggatcacctggcgggggaagtggggacaggatccagctgctgtccaagaagctttaaaggggggcgccaggaggagtgtggtggggccctccataggggcgggaggcctgtgatgggcacccaggtgcagcaaggactctctaaggacctaagtgccctggctctgggtttcaatcccagctctggctgggtgcagtggctcacgcctgtaatcccagcactttgggaagccaagatgggtggatcacctgaggtcaggagttcaagaccagcctggccaacatggtgaaaccccgtctctattaaaaatacaaaaaatatctgggcatggtggcgggcgcctgtaatctcagctactcgggaggcagaggcaggagaatagcttgaacccgggaggcaaaagttgcaatgagccgagattgcgccactgcactccagtctgggtgacagagtgagattttgtctcaaaaaaatcaaacgatcaatcaatcccagctttgcatgcactgtgtcacctgggcaagttacttaatctttctgtgcctagtttcctcctctgtgaaatggagctagaacctgagcaccagttcacacatggttgtcaggatccagcaggatgcaggtgagggtgtggcaccgtgcccgggccctggacagtacccagcaagcctgagctgttttcatttctgctggtggcagcagggctgagatgacttcctgcaggaggcagcagttattctgggccaggaagaaacttgagaataagggcagatcgtggagggccttgcaaccacaggaagattttgttcctcatttgggtggaggcagcggcagtccttctggctgtgatgtgcagaatggtggggagggagtgacaccaggaaggcggctgtcccaaaggtctgagcagagagtttggggcaacagggagggagcagtggaaagcaggctgatattcaggagataaccaggacttgtaagactgtgggcatgggaactgaaggggatgctctgcaaagggcctgggcccaccttggctcctccctcacttctcagcctagccaggagcagagaatgggacagtcttaaccctagacatcccaatgggctttgggccttggggtggagagaggatgagaaaagatgtctgggcttttgcaatcgggagggatgcctggaggaggcagaggtgttgagaggcaaggggagggaggagatctcaggtacaaggtttgttccctgggtggtggctgcagccacaaagtctgccaagcaaggtccagctcaggcatgtcaggataggactcggcccccgatcccttcaacagtccccaatgccacttgggctgccaggccctgtgctgggtcctggggacactgatggctctgtctgccctcaaggggcttcccagggagccggacaagcaaggggctgaggcctcctggagaaagcatggtagtggagtcggcgcaaggggcggggtgaacacagaggatgtcaaggaaagaccccacgaagaggtggcatctgaactgggctctgaaggcagagaaggaacaggggaggcacaggagtggtgggctggggggcttggtgccccagctgggggtgccttgtgcaaaggcaccaaggcagtgagaaccaggagcagggctggcctggccagcagggtctgggtgtggagagcccagagtgccaggtggaagggtctggccttctccagagggcagcgggagcagtcttggctgggagttctgtgggccagaatgtgactgggaaaaaacatggcagggattgccccactcctcccgtgcagacctctcaggccctcccatgccccctccactggccagatcaggaaatgagcccaaggttgctcagagcaggagctggaggcccagcctctagccttcacgcctaccccaggccgggtcaccctgtgtggtgttgatattctgggctgggggggagggagaaaggaagagcattcacctcaatttatctggagatatggaagaggttgtgaggctccagcctccagctccacacactctgcccttcctctgccagggcagggactgggaacaacctgagacggcagccacacctgatgccactctccctaccccttgcaggtatgaatttggcccagccctgttcgtgggctgggcctcagctggcctggccgtgctgggcggctccttcctctgctgcacatgcccggagccagagagacccaacagcagcccacagccctatcggcctggaccctctgctgctgcccgagagtacgtctgagctccgcctgccctggccagccccccacccagtggcccccttgcccagcatccagccagcctcgcagcaccctgggcagggccactggggcataggatgggcataggtgctctgagcagcttgtcctcaacacaagcacccaccctgcaatctgagacccagatcctcagagagacaccagaggcaggacccagcccccaggcatacacacagatgcaggtccaggcacggtcttgtctgcacagcctggtgggcaccagcatgcatccctggagacaggccctcaggcaccagcccggctgtttactcactgaagagctgcttgggtgtctgctacgtgctgggccctagagatagagcagtggccaagacgtaccttagtacccaggtccttggggtgagcagaaaccttcaccctccccagtcccatgggctcctcacagcaaccccacaagggcagtgccgggatgctgaacgttcacacaaggacagggagggtctgagtttaggtctcaggttcttccagtgcgcccagggctgggggccacctacacagatggtgaggtcggaccatggcgcccctgcccccgggaatgggccccaggcagggctgctgtgagggccaaggtctggccacgctggccagtacccatgtccgggcctgaatgcacagcccctgcccccgaccccacagctcactccactaaccagctctctctcttttgactttcagaccagttgttaaattgcccgcctccgccaagggccccctgggtgtgtaatgtccagtccccagccaggctctgtcccctgccatacctagactgtgtgtttcatatttttttggaaagagaagtgaacatccagccccaatcatggtatcattcggtctgtcctcagcgtggcttggacggggcctgtgtcagagtggtcagtgctgacccctggggctcttgggcagaaagatgaggagacagaggtccagggtgggttacatagcacatccagggctaagcaagaaataattcagaggtcctaccctctgtctagggacccccctcccaagcctggccttggccttggcacaaagtcctccttgataggagatcccactcactcctggaggctgcccctgaggcttggcccagctctaggagcagtccccagggtcagggagcccctggtgtggaaagaggccccaaggtagtaaaccctgcccctgttactgtgctccagagacctcctaagggaagggacagttcctggaaggccctccagctggatgctggggatcagcgataggtgaggggacacagtgtaggagctccccatgtagaaaagggaatgtggggagggcgttaggagcttgcaggcattaggactgtcctgagcaaggtctgcagcccccagctctgctcaccccgaatcctgccccttgtttccacacctaccattcctcctctcctgatccccagcatccagctgaggtccaaggtctttgtcctagaatcagagtggggaggggacagcctggggctgcccagagactgtgggtggagctgcctgctgcactcagcagtgcggtcagagaagggcttttggtcttgaagtccaggtaccatccccccttagcatacagggggaagggcctgagaggaatgtaaggaaaccagcccagatcagtcccaaggccagagtcctttgtcctacatctccctgaaccagagtgtgccctgcccctcatgctcagacctctcccaccccaaaccctctcccgggactcagtctccctggccactgcgtatcaggcttctggggaaagcatccatcacagaacctccccttccctgccacgcaccttccttggccagctccattctggcctcctccaccacctgccttgtgaccacatctcccaccacgtccccagatctcaagaacgcagctcagcttctccttcgagcttgactctgagagggaaagtgacggaaaccaagtcagatgagatgactgccatgtacactgcagtcaagggcagggaggggaggaatgacacaaatggcagggagctgctgggggactgacccctcggcgcctggcctggccggtgctgcacatccaccggggcacaacagggacttgtccagcctctggtcagaggatgtggccacctgaccctaaataggttccccagagtcctgcccctctaatgaatgagaactgcaggagtttctcctctgggtgcctgaagctatagtgcaatggttcccaaccctgcatgcacattcgaatcacctgggggcacaatgcctaggctccaaccccagacactcttatttcattggtctgggtggacctggcatcagaagtcatgtagctcctcaggggactgtagtgtgtggtcagcactgagggctcctctatgaggcctcaagcccaggtgactctgtgaggtctgcagagggagaaaagaacccacaagggaagaggtggaggtcaggcacggtggctcacgcttgtaatcccagcactttgggaggccgaggtgggtagatacctgaagtcaggagttcgagactagcctggccaatatggtaaaaccccgtgtctattaaaaatacaaaaattagctggctgtggtggtgggcacctgtaatcccagctactcgggaggctgaggcaggagaatcgcttgaactcgggaggtggaggttgcagtcagccaagatcgtgccactgcacaccatcctggatgacagagcaagactccatcacaaaaaaaaaaaaaaaaaa

SEQ ID NO: 816 - DNA, 9839 bp, Homo sapiens
cggtgggctcaaggcggtggactttagcggccacgatctgggcagctgcgtgcgcgagttcggggtacggaggggctgctatcggctggcggcccacaagctgcttaaggagatggtgctgctggagcggctgcggcaccccaacgtgctgcaggtacgagggtggggacgcgggggtaacggtgttggctgggagtgcccaagaccttgtcaacctggctggaagagaaccccttgatctggagtgccagtgactgcacccaggctaagctagacgcagaaaccggaccatggcccttcccactgcaccaccctgcttctcactcctgggtgggcgtccctttaccggagaactcctgggtttctcggcttccacacatctcttaaagacaggccaggacagaggctcccaaaactcagggggtggggcagtccattaggatttaggactctactccgggctggagttaggaggttgaacaccagggatattaccccaagccaaaatgaccctaagccaagacacttgagtcagaattccaactgtgtgataaagtcccccttcttgatggaacttctcccaacttccagtgatttgtctggttttgaaaatgagacgggacagcagtggggctgggaagagctggaaagagaccatgtgtcaggcttgattcctatagagtctccccacccacccacctccagcgccacccagaagacactggaagggggctggggagcaggctagaaaaagggaacacagtccttcccagaagtgaactaagggttccccaggccttaaagtgggtccttgagcccctggagaagcctgaaggtctcagctcagtggacagactggcggcctgaggatctaaatgtcacactgtctgagtgtatatagatagccaagaggctggaaggttgagaaggccaaatgctcaggttcctactcaacgggactctgcctcgcctgttcactggagacacaggcgagagctgaaacccccaccttgtcccctccaagctagactttgagtgggcctctcacagtcccagcaccgccctaacactccacgtcctctctctcaggtctccccccatcctaagattagacagactattccctttgcacatgtctgagcaaacagagggcaatccctgaccgctgttggcccggtgaacatgggtgtgtgcagcctccccaacggatgaaatcttgcacacaccttccacctaccagcccactcaaactaacctttctgcacccagcagaaatgactggaaacccaggagtccctctctcctttccttaggagtgagatggcaccccagccctggagggagatgggtgggcgtcgtagagcaggagagactggcccaaaagttgtttatactcctgttggctcccagtctccccctcccccatcgtattccccaaccctggtcagacacttgtgaccgggccctgggccccaaactggtctcaggagctcgggcagaaccaacacttgcgtgtagtgaagcctggctgcacagctcacaccgtgtctgcagcttcagggagtgagcccctggttacgtggccattctaactgggaggatcttgtactctttccttcccagggacttttgggaactttttggaaactctagggtgtcagccagatcctgagggagtggagaggtcttgagtgacttagcaggacataaagtcttagttacttgactcaagacccctctcccttcagacgggtttgatgtttgatgtgctttcctatcttttaagaaacttgtccctcactcttcccgccagctcaaacttcctgacaagcattcagctaacgccccacatatatatcacgtgacggtcctcctctgaaatgtcaggcccccagcccaattctgaaggcaccaaagaaaaaattacaacagaatagttttcacccttccctcaccaaaccaagaccagggttgtctggggttagctgtgtgactctttattgtagagtcccagacgagagttagtggccccagggcacaagggttgctaagggagagagggtcacaggtcctttctacccaggaaaagtgaaaagtggggggccctttagtgtgagtttagggactgctttgatggtggctctcccccattcatcttctgaccatcaggccagtgtcgctctggcctcctaaacacggccatctttgctggcagggaagcctacagtggggtcttcctgcccaggaggcttcagggcaggtgtacagggaactagaaataatgctgctttaatacctctgagttatttaaaatttcaaaaccatttgactgtttgctgaactggggaggagttagagaacatttctagagttcctagtggtgcaggctcaccaccctccctctctgagcagcccagaattggtgctgtggattctaatagaaaatgcccaggctagcaggccccattctgcacctcccagggctttctctggtcatggggattgcctgggcgagatctttctatccattttctttgacccctccccatcccgcccctgacacacgcatacacactccctcacgtgacttgactcctctatagcccagggccaaagggcacaagggtctcccctcccctcaacctctccccacctccccctcccccagtcatcctggggcccccaggccttggatgggcccccaggcctgcctgggcccagattctggccctgctagagtatatttcttctcccaaccaaacaaaagatgtgactgaaatgctcagcctcacgcttcctggggggggttaatggtgtctttttattttttcctgaggggtgttgattaatacctcgttaacagcgcatttaacgacctccgggtgtttaataaccttcagaagtttcccacaaaggctcagactctgggcaagaaaatgagaaccaggccccagggctgttccccttaccttccccccaccccaccagggtctggggcttccctggactgatggggagggggtggagagagaagagggtgcctggagctgccctggccccccaagtcacagcccaagagtgaggccttcccccatgccagcaggatgacggggagctgagggggcactcctagggcgggaagaggacatgtgaggacctggagtggctctggggagggtgtgaatgatggtatgagggtgacagtgcacagggatatccacccctccaccgcatagctctcctctccctgagtcgggcctggacaactcagccttcgtgtttctaccccacagggtgctggttgttttgagcaccatacgagcccctagctgctgtggagtatgttggaagagccagggggatgcctgtgggtgctgttaaggtggtagtgacactcaggctttgcttcccagaagtccctgggcagtgcggagcttctccccagatgacatagagtgggcagttccctgtgaccgtaaccccaaaagaactgatcttccaggaggaatcatcactcactaccacccccactgatacacatcactcatatgcaaaacacacctggggatgtgccctcaggtaccttgttcttatcaacacttgttaccagtctaagggaacttgcttttcctccctcaagacccacgcagagaaaattgaagctgccagaaggtagaaatgatgagggatagatacagattcaaggaggggaggaaggataatgtccaaccgtatgctcgcttgtgtattaccaaacagcattcttagaaaaaacagattgtggccgggcgcagtggctcacgcctgtaatcccaacattttgggaggccaaggtaggcagatcacttgaggtcggcagtttgagaccagcctggccaacatggtgaaaccctgtttctactaaaaagacaaaaattagctgggcatagtggcaagcgcctgtaatcccagctactcgggaggctgaggcaggagaatcgcccgcacccaggaagcagagtgagctgagatcatgccactgcactccagcctgggcaacagagcgaggctgtctcaaaaaaaaaaaaagaaaagaaaagaaaaataaataaaaataggttgtggaatccgagtggcacaaattcacatcttaggctcctacattgatcagctgtgcgaccttatgcaagcaacttaacctctctgagtcagcctcctcacctgaagttggagataataatacacctactgtgcccattagggttattacaataattgagttatgcacgtagagcaatttagcatggtacctggcacgtggttaactcacagtggccagacctgcctatttacctgagtcggaaggggtgaggggctgacatggtcagtaggaagtctgactgcagggaagagagggcatgcttcccaggcaacgctgccattctcttctgccctgagctgagcaaaggccctgggattggtgggaggagagagagggggaacctgacagtccagctcttccctgtccccacccccaccctgtgacctaatgacctgccctcggctttccccagctctatggctactgctaccaggacagcgaggacatcccagacaccctgaccaccatcacggagctggcgcccctgtagaaatgatccagctgctgcaaacttcctgggaggatcgattccgagtgagctcagaggagggctcgggccctgggctccttgctaggatggttctgccttagaaggccagccctccaaagcagctcccactcctcctccacccagggagagggaggggaggaaggcgcacaggctgactcagccaccggccaaagggttcaaaaaagaagcaagacttaaaggatcccgacatgctgtgctcttgccctcctcacccctccttgtgcgcgtgtacacaccagcttgtgggggctggcaccttaaagaggggagcactcacacactcacactcagcctgactgcaggagggccagtgtcctagaactaggaaagaccttaataccatcctgaccctcccgatatttccatacactgaactaaaacaacattcaggatgcaacttcagggaagagatgcattatccccagaccctcgctgctgcagtttcccacccactccatatcatttccagggtcaggccagccgagagttaatagaaaatcactggcctcctctctaaggctgctgaccttggcctttgtggagccctggggcctatagaagagaagtgccaacccccacaagcaaagttcagattccaagaggagggtgccctcgagtcccacagacccccaacccaggagaaaagcagtgagcagtcttttcttgtgcccctcagatctgcctgagcctgggccgcctcctccaccacctggcccactcccatctgggctccgtcactctgctcgacttccgcctcggcagtttgtgctggtggatggtgagctcaaagtgacggacctggatgacgcacgtgtggaggagacgccgtgtgcaggcagcaccgactgcatactcgagtttccggccaggaacttcaccctgccctgctcagcccagggctggtgcgagggcatgaacgagaagcggaacctctataatgcctacaggtgacctccacccctgactcgggaactccatcgaaggagaatgggccaggagggcatggcaggaagagagccaacgtggaggccagctgggcagggagactcagccttgaccagagcaagggaaggcttctaccctgtccagaagggaacattcaggcctctgatggagaggctaaaaatagacagctccaaggagaatccgggttagggggtggcagctggaggcttcttaaaatagtgttggactcggagcctagggctggtggaactggcacttttcccttcccacccaggcccttgtgctctgggaaattcctcactgggccccagccatggggctgctccgacaccgggagtcagtcaggggataatgtggggctgggaggtgggcaagtcctgggaagggttgggaagcaggcccctggtttcggttagtatgaagttaggtgtggtgttagcatgtgcccagaaccctcccccgaggctgagtagacttcactgcgttctgcctggttgctaggcctgagggatccggctccctggccaggttagcgttctgccccaggttggaatagaggaaggatgtgtctccaaaggctggattcctgagccactggtttccctctgccacaggtttttcttcacatacctcctgcctcacagtgccccgccttcactgcgtcctctgctggacagcatcgtcaacgccacaggtgagctctccagggcccatctgcttccaggcacctaccccacccccacccgccagcaaaagtggggagaaaaataacccagggcagcaggggttctagaaaccatcacttcctaaggtggcattctgccgcaacctccccgctcccccgccctctgttcactggggcacaggctctggaggcagaggtgggagcagctggctgctgacttcagggaggagtgggagccccaggcatcctgtcttagccacactgcactctgcaggagagctcgcctggggggtggacgagaccctggcccagctggagaaggtgctgcacctgtaccggagcgggcagtatctgcagaactccacggcaagcagcagtaccggtgagtggccccaagctgatccacagggaagcaagaaacaggtgggagggtgaatgaccccgcccaattaggctaagtggctcaccctttctctggggacccttgtctccaaaggccactgtaggggctcacatagaatcatggaggggctgacatggactaatttgaggttccatctctagctgagctagagcaactataattctgccttcaacctggggttgggcactgatacccctactctggatggctccaaaccctatcatgtactggctatatgactttgagcaagttaccccttgaacctcactttcctcatctgtgaattgggttcactattacccacctcaccaaattcttatgggaattaaatgtcaggtgaaatgtgtgaaagcaattagtgcagttcctatgacacagctggaacgcagtatatgtttgcttccctttccttcctctaacctcccggggctagaagggcactgcatgttagggaaggcacacactgaaaccagccaagaagccccagggcagggggagaattctggccactggtttcaggctgtggtccttctgctgaagccctggggtttagctggggttggcaggggttgaggggtgagcaggtttcatattcaaggagttctggctagtcttaggggtgggggagccctgttagccctgtaaataaagtttaacgaggtgaacaatggctggctctgtccctgaggatgctgtttatggggctgtaaatcacagtcagccctggactttggtctagtccctggtagaaggaggcaggagggtggggtggccagaggcccagggcttctgcattatcagtccagagctggggctctccaggcagtgggaaagacaggagcaaacaagaggccagcagctgaggagctcactgattgtgagttttcagagcttctgaggctctctctgtagaatgagatctcagattttccctccagccccctccccactctagccatggattttttgcattttagtccatttgcatgcctcttaacttcaaaaaccccgactcccttccatcccaggcccttctgaggaacttgcctaacttctctccccaaggccaggagaaaatgtgaatgagggttgctctgaacccttgcaggccacactggatgctggttagaagtacagattctcagttctaccccagacctacagaatcagaatcttcatttggttgggcatggtggcttacacctgtaatcccagcacttcgggaggctgagatgggaggatcccttgagcccaggatttcaaggctgtagtaagctatgattgtgtcactgcactctagtctaggcaacagagtgagaccccatcaaaaaaaaaaagaaaaaaaaagaaaagaaaaagaatctgcattttaacaagagtccttggtaattcacatgcacattgaagtttgagaagcctggctccaactgtctaaaatgtcctggcctcagcaattagcctagacagctgggactccatgtgtccctgtatatgtctgtacccctttcatgtgcctgctatcttgtactgcctgaccaagctatgtgcccttagatttgggaaatatgtatctcctgaaaatcaagtctgtgctttgtctttattgagcagtcagccctgtttcaacagtggtagctgccttcatctgcgtgctagagggctgggctggacttcagctttcacctaggaaatgagtcttgctgccctttccagaaagtgacacatccttgggcactcaaacctgggcatacagaattctcattttactccatccccaacccacagagtaccagtgtatcccagacagcaccatcccccaggaagactaccgctgctggccatcctaccaccacgggagctgcctcctttcagtgttcaacctggctgaggctgtggatgtctgtgagagccatgcccagtgtcgggcctttgtggtcaccaaccagaccacctggacaggtgagccagtgggagaagcccttccaagggagatggcaggacctctctggaggttgatagatagtgatcccccatcggaagtcagagggggtgctgaggtgatgagagagaggtatacgtgtcttcaaggcagtcaaattagggagaatggtcttgcctccagaaagagaaacatccagccctgttacctctcacctctgccccccaggtcggcagctggtctttttcaagactggatggagccaagtggtccctgatcccaacaagaccacatatgtgaagcctctggctgacctatctgagggctcggctgaccagctgactatcctcagcagctgggcttgcctgtggagggagtgacttgcactggcagcactgcatgtcacctgggaacccctgcagacaaagctaacatcccagacagacagatgtgaccaggacaaacgtgcaataatgccaaatgttaaaatgtgagtttaccagcctagctatgggactgctggctcctagtccaggaatcatgggggtatgactgcctctccaaccctgtgggctgtaagcaagctcaggctagtctccccactggggctgtgcccctccctgggacggttccgtgggcagccccatcactgtgttcaatagtgtgagaatgtagctaaagcccctgctgctgctgctgcacatgccacagcaggcggtgggggctgcgtggggacaatccatcgtggagtgttctctcagcttaggtctggacaggagacttggcgggagatgctccaggatgtgggtgattctgtacctggggaggctatctctgacctcccgacaggggacactcccaggccagcccaggggtcaggggcagaggtgcacacctcagcatgagccaagactggggtcagggagcaggtgtggtttgagccaggacctggggcgggggtggggccggggcctttctgcctcatttgctttcaatgaaagcctcaaagcagccaaaaccaggctttcccccttcctcgagtttgaatatccagaatcttttgtacttcttgttggttaaattgtttatttttgtaaaaaataaaataaaattagttaataaaatgatgtttcacagcaaactcttccctaa

SEQ ID NO: 817 - DNA, 534 bp, Homo sapiens
gggaagatgagtgaaatctcagcagcaaaccctgaagtcatcacaaagtgttttcaggccctgctcccacccatggtgcccacctcctgctgggtcttccacatcgtgtccccaaaaaagacatggggactcccttttcccccaaggaagttctcatttttacagaccggcttcttatgtatgaagccctaacccagtggaataatgtcctcatggtgagatgtcagccatgaaggggtcacaaggagcacccgaacaacctgcaggtgggtcagctttacctctgcccagggttggacctggcctgggcccaccacaaggtcatgggcactaagcttttctgagtctttccctgaacatgaaatatatgaacattcagaagaaaggagggtctgtggaaagaccagcttccactttgtcaattttaggagggaaggtctagctgggctatatcgaagtccagagcaaaaacaagaacctgcgggtttaggatcacacggaggccagagagctccgccatgaatgcagggcttc

SEQ ID NO: 818 - DNA, 7207 bp, Homo sapiens
tttttttttttttttttttttttttttgagagaaagagtcttgctctgtcgcccaggctggagtgcagtggcgtgatctcagctcactgcaacctctggctcctgggttcaagcaattctcctgcctcagcctcctgaatagctgggatcacaggcccgtgtcactatgcccagcaaatttttgtatttgtatcacaagggtttgtgataaaggattgatttattaattactatattttgcaagaattaacattattatctttaaagcaaaattagaaatgcctttgatctggacactcccaagtctgggtctcttcagtaaacattattaatttgttcctttaaccataaacatctagaggctaggaataccaaactttctagaaacacagcccagcaagtcccagcttcattttgctagccctcactcaaaatggagttgctctggttcacacgtctctgacagcaggattaaaagataatatgggccaggtgtggtggcttatgcctgtaatcccaacactttggaggctgaggtgggcagatcacctgaggccaggagttggagaccaggctggccaacatggtgaaacctcgtctctactaaaaatacaaaaattatccaggcatggtggcgcccgcctataatgccagctactcaggaggttgaagcatgagaattgcttgaatccaggaggcagaggttgcagtgagccaaagctgtgcggctgcactccagcctgggtgacagagtgagattctgcctcaaaaaaaaaaagaagactgcaagtaatctgtattcaaaacaaaaataaatgcagataatacaataatacagaagagtataaaatgcaaagtgaaaggtcttcctaaccagtttcaatcactagtggcaatcctgtcaacaatacctggttttatttcttcaaaggagaggcattaattttataaaacatacttttattttctgaaattttcacatctttcccttcttttacaacccatggtgtcctctttcttgtattctttttttatttccctgaagcaatttttttaaaagatgcatgaacagtaagcattctgatcctaacatctaaacatgtctacagtgtgccctcacacttacctattagttggctgggtatattcaggttgaaaatctttttttttcttttttttttttattatactttaagttttagggtacatgtgcacactgtgcaggttagttacatatgtatacatgtgccatgctggtgcgctgcacccactaactcatcatctagcattaggtatatctcccaatgctatccctccccgctccccccaccccacaacagtccccagagtgtgatattccccttcctgtgtccgtgtgatctcattgttcaattcccacctatgagtgagaatatgcggtgcttggttttttgttcttgcgatagcttactgagaatgatgctttctaatttcatccctgtccctacaaaggacatgaactcatcattttttatggctgcatagtattccatggtgtatatgtgccacattttcttaatccaatctaccattgttgggcatttgggttggttccaagtctttgctattgtgaataatgccgcaataaacatacaagtgcatctgtctttatagcagcatgatttagagttctttgggtatatacccagtaatgggatggctgggtcaaatggtatttctagttctagatccctgaagaatcaccacactgacttccacaatggttgaactagcttacagtcccaccaacagtgtaaaagtgttcctatttctccacatcctctccagcacctgttgtttcctgactttttaatgattgccattctaactggtgtgagatggtatctcattgtggttttgatttgcatttctctgatggccagtgatgatgagcattttttcatgtgttttttggctgcataaatgtcttcttttgaaaagtgtctgttcatgtccttcacccactttttgatggggttgtttgtttttttcttgtaaagctgtttgagttcattgtagattctggatattagccctttgtcagatgagtaggttgcgaaaattttctcccattttgtcggttgcctgttcactctgatggtagtttcttttgctgtgcagaagctctttagtttaattagatcccatttgtcaattttgccttttgttgccattgcttttggtgttttagacatgaagtccttgcctgtgcctatgtcctgaatggtaatgcctaggttttcttctagggtttttatggttttaggtctaatgtttaagtctttaatccatcttgaattgatttttgtataaggtgtaaggaagggatccagtttcagctttctacatatggctagtcagttttcccagcaccatttattaaatagggaatcctttccccattgcttgtttttgtcaggtttgtcaaagatcagatagttgtagatatgcggctttatttctgagggctctgttctgttccattgatctatatctctgttttggtaccagtaccatgctgttttggttactgtagccttgtagtatagtttgaagtcaggtagtgtgatgcctccagctttgttcttttggcttaggattgacttggtgatgcgggctcttttttggttccatatgaactttaaagtagttttttccaattctgtgaaaaaaggcattggtagcttgatggggatggcattgaatctgtaaattaccttgggcagtatggcctttttcacgatattgattcttcctacccatgagcgtggaatgttcttccatttgtttgtatcctcttttatttccttgagcagtggtttgtagttctccctgaagaggtccttcacatcccttgtaagttggattcctaggtattttattctctttgaagcaattgtgaatgggagttcactcatgatttggctctctgtttgtctgttgttggtgtataagaatgcttgtgatttttgtacattggttttgtatcctgagactttgctgaagttatttatcagcttaaggagattttgggctgagacaatggggttttctagatatacaatcatgtcatctgcaaacagggacaatttgacttcctcttttcctaattgaataccctttatttccttctcctacctaattgccctggccagaacttccaacactatgttgaataggagtggtgagagaggacatccctgtcttgtgccagttttcaaagggaatgcttccagtttttgcccattcagtatgatattggctgtgggtttgtcatagatagctcttattactttgaaatacttcccatcaatacctaatttattgagagtttttagcatgaagggttgttgaattttgtcaaaggctttttctgcatctattgagataatcatgtggtttttgtctttggctctgtttatatgctggattacatttattgatttgcgtatattgaaccagccttgcatcccagggatgaagcccacttgatcatggtggataagctttttgatgtgctgctggattcgttttgccagtattttattgaggatttttggatcgatgttcatcaaggatattggtctaaaattctcttttttggttgtatctctgcccggctttggtatcagaatgatgctggcctcataaaatgagttagggaggactccctctttttctattgattggaatagtttcagaaggaatggtaccagttcctccttgtacctctggtaaaattcggctgtgaatccatctggcctggactctttttggttggtaaacaattgattattgccacaatttcagatcctgttattggtctattcagagagtcaacttcttcctggtttagtcttgggagagtgtatgtgtcaaggaatttatccatttctgctagattttctagtttatttgcgtagaggtgtttgcagtattctctgatggtagtttgtatttctgtgggatcggtggtgatatcccctttatcattttttattgtgtctatttgattcttctctcttttcttctttattagtcttgctagtggtctatcaattttgttgatcctttcaaaaaaccagctcctggattcattgattttttgaagggttttttgtgtctctatttccttcagttctgctctgattttagttatttcttgccttctgctagcttttgaatgtgtttgctcttgcttttctagttcttttaattgtgatgttagggtgtcaattttggatctttcctgctttctcttgtgggcatttagtgctataaatttccctctacacactgctttgaatgcatcccagagattctggtatgttgtgtctttgttctcgttggtttcaaagaacaactttatttctgcctttatttcgttatgtacccagtagtcattcaggagcaggttgttcagtttccatgtagttaagtggtttggagtgagtttcttaatcctgaggtctagtttgattgcactgtggtctgagagacagtttgttataatttctgttcttttacgtttgcttaggagtgctttacttccaactatgtggtcaattttggaataggtgtggtgtggtgctgaaaaaaatatatattctgttgatttggggtggagagttctgtagatgtctattaggtccacttggtgcagagctgagttcaattcctgggtatccttgttgactttctgtctcgttgatctgtctaatgttgacagtggggtgttaaagtctcccattattaatgtgtgggagtctaagtctctttgtaggtcactcaggacttgctttatgaatctgggtgctcctgtattgggtgcatatatatttaggatagttagctcttgttgttgaattgatccctttaccattatgtaatggccttcttggtctcttttgatctttgttggtttaaagtctgttttatcagagactaggattgcaacccctgcctttttttgttttccatttgcttggtagatcttcctccatccttttattttgagcctatgtgtgtctctgcacgtgagatggatttcctgaacacagcacactgatgggtcttgactctttatccaatttgccagtctgtgtcttttaattggagcatttagtccatttacatttaaagttaatattgttatgtgtgaatctgatcctgtcattatgatgttagctggtgattttgctcgttagttgatgcagtttcttcctagtctcgatggtctttacattttggcatgattttgcagcggctggtaccggttgttcctttccatgtttagcacttccttcaggagctcttttagggcaggcctggtggtgacaaaatctctcagcatttgcttgtctgtaaagtattttatttctccttcacttatgaagcttagtttggctggatatgaaattctgggttgaaaattcttttctttaagaatgttgaatattggcccccactctcttctggcttgtagggtttctgccgagagatccgctgttagtctgatgggcttccctttgagggtaacccgacctttctctctggctgcccttaacattttttccttcatttcaactttggtgaatctgacaattatgtgtcttggagttgctcttctcgaggagtatctttgtggcgttctctgtatttcctgaatctgaatgttggcctgccttgctagattggggaagttctcctggataatatcctgcagagtgttttccaacttggttccattctccccatcacttgcaggtacaccagtcagacgtagatttggtcttttcacatagtcccatatttcttggagtctttgctcatttctttttattcttttttctctaaacttcccttctcacttcatttcattcatttcatcttccattgctgataccctttcttccagttgatcgcatcagctcctgaggcttctgcattcttcacgtagttctcgagccttggttttcagctccatcagctcctttaagcacttctctgtattggttattctagttatacattcttctaaatttttttcaaagttttcaacttctttgcctttggtctgaatgtccttccgtagctcagggtaatttgatcttctgaagccttcttctctcagctcgtcaaagtcattctccatccagctttgttccgttgctggtgaggaactgcgttcctttggaggaggagagccgctctgctttttagagtttccagtttttctgttctgttttttccccatctttgtggttttatctacttttggtctttgatgatggtgatgtacagatgggtttttggtgtggatgtcctttctgtttgttagttttccttctaacagacaggaccctcagctgcaggtctgttggaataccctgccgtgtgaggtgtcagtgtgtccctgctggggggtgcctcccagttaggctgcttgggggtcaggggtcagggacccacttgaggaggcagtctgcccgttctcagatctccagctgcgtgctgggagaaccactgctctcttcaaagctgtcagacagggacatttaagtctgcagaggttactgctgtctttttgtttgtctgtgccctggccccagaggtggagcctacagaggcaggcaggcctccttgagctgtggtgggctccacccagttcgagcttccctgctgctttgtttacctaagcaagcctgggcaatggcgggcgcccctcccccagcctcgctgccgccttgcagtttgatcttagactgctgtgctagcaatcagcgagactccgtgggcgggcgtaggaccctccgagccaggtgcgggttataatctcgtggtgcgccgtgttttaagcctgtcggaaaagcgcagtattcgggtgggagtgacccaattttccaggtgcgtccgtcacccctttctttgactaggaaagggaactccctgaccccttgcgcttcccgagtgaggccctcgccctgcttcggttcgcgcacggtgcgcgcacccactggcctgcgcccactgtctggcactccctaggagatgaacccggtacctcagatggaaatgcagaaatcacccgtattctgcgtcgctcacgctgggagctgtagacgggagctgttcctattcggccatcttggctcctccccctgaaaat

SEQ ID NO: 819 - DNA, 254 bp, Homo sapiens
gctgctttaaaattctcacatgctaattgcaatatcttagtcatttcaagaccagtctttgttgtcctttcctatatgggttctgtttttctgtttccttttatgtagaccaattttggattttgtcttagacattggaataatatattgtaaagactctggatgctattctattatgttcctctaaaaacttttttttaaagcaggcagttaaattggctgaaaaactgtaatgagcagtaactcaaatctca

SEQ ID NO: 820 - DNA, 583 bp, Homo sapiens
catccagttggtgggatattcaatctcactcctcagtagggttctctacctcctcaggtcccagagaatagctggtgggaggagttggagaagagtcctctagacctctgtccatgctggtctctgttaagttcaccatccctgcccacatggtcttctgacggtaggcaggggatatctgtgccattgctcccaggactatattcttggagtccaccagcctgagactgtgcaatcctggggtgatacttttgctcagcacagaatcacccccaccgcctcccagaacccgactccatctgttagtctcaggaatcttcctctccccttgggtcccacagcttctacctgttaagtttcatgcacttactttctacataactctcactgagccaaggttattgcaaacaaaaggctaagaaggagttgtcttctcttgcttggcaatgtctgcttcctgatggaatacaaaaaccacctaggtaaaaacaaaaacaaaaaacacaagacgtggctaccttcttagcttgggaaagggaaaaatatctacagcagcaagaataaaggacaaattactgccttg

SEQ ID NO: 821 - DNA, 506 bp, Homo sapiens
ataagactgagggagagcatatgtgtgtattgtggcttattgttacaactatctcctagattcattgaagatagaagttacgtttgtttcatagtctcctcattggcttgtagcaatttttcaaaagaaggaaggaaacatttttaccttacaataaaagtctgaaaccacatattttatggtgatctataggaggactaactggaaccagtcacagggtactgtccctaacagaatgtgcatctttcatgcagtaattatattttactagtggaaactacattccaggaaacctttacataaaggttttacaatgttgaaaataaaagatatgctttttacctttaaaaagaaaggtggaacttaattgagaatattatagaattatttcaaaatcagactgcttttaaaaaaacttcaacttttattttagataccgggggtacatgtgcaggtttgtcaaacgggaatattgcatgatgctgaggtttgcgatacagatcctg

SEQ ID NO: 822 - DNA, 506 bp, Homo sapiens
ataagactgagggagagcatatgtgtgtattgtggcttattgttacaactatctcctagattcattgaagatagaagttacgtttgtttcatagtctcctcattggcttgtagcaatttttcaaaagaaggaaggaaacatttttaccttacaataaaagtctgaaaccacatattttatggtgatctataggaggactaactggaaccagtcacagggtactgtccctaacagaatgtgcatctttcatgcagtaattatattttactagtggaaactacattccaggaaacctttacataaaggttttacaatgttgaaaataaaagatatgctttttacctttaaaaagaaaggtggaacttaattgagaatattatagaattatttcaaaatcagactgcttttaaaaaaacttcaacttttattttagataccgggggtacatgtgcaggtttgtcaaacgggaatattgcatgatgttgaggtttgcgatacagatcctg

SEQ ID NO: 823 - DNA, 476 bp, Homo sapiens
  misc_feature (282): n equals a,t,g, or c
tagaatttgaactctctcaaagttataattttctggtacctgaatagccataaactaagccagaagtatcctccatttttcctctccttggaaactaccttaacaagccccaaccagctctgttacttacctccctccaggaggcaggtgattccagcagctgtccctccaggagctgtacagtgaatgtctataaacgtcacggcaggggcgctgacctttgcaaggcttcagcagttgtgcttttttgtgaagactgttttggtagacactttgcctgcntttctgtaagaaaagaaatgtccagtgttagagtgagggagatttgggcaaatgcaagatggggtgtggggggtgcaaatgaaaaccatttcctaagctgctttatgttgtctctgagcaattgaatagccgtgcacagtggtgtgtgattgaggaagagaagaccatgttgaagaagctgtgttctgacccaa

SEQ ID NO: 824 - DNA, 641 bp, Homo sapiens
tagaatttgaactctctcaaagttataattttctggtacctgaatagccataaactaagccagaagtatcctccatttttcctctccttggaaactaccttaacaagccccaaccagctctgttacttacctccctccaggaggcaggtgattccagcagctgtccctccaggagctgtacagtgaatgtctataaacgtcacggcaggggcgctgacctttgcaaggcttcagcagttgtgcttttttgtgaagactgttttggtagacactttgcctgcatttctgtaagaaaagaaatgtccagtgttagagtgagggagatttgggcaaatgcaagatggggtgtggggggtgcaaatgaaaaccacttcctaggctgctttatgttgtctctgagcaattgaatagccgtgcacagtggtgtgtgatagaggaagagaagaccatgttgaagaagctgtgttctgacccaaagcagaagcgagagaaagcaagcagctttgttccgggaactctctagactcccagttacactgtttcattctgatccaaactagattttcaaacgtgggtctcatgcatgaaatgacaataagcacattcctggatagggcaattatagataaaagctcaaattt

SEQ ID NO: 825 - DNA, 641 bp, Homo sapiens
tagaatttgaactctctcaaagttataattttctggtacctgaatagccataaactaagccagaagtatcctccatttttcctctccttggaaactaccttaacaagccccaaccagctctgttacttacctccctccaggaggcaggtgattccagcagctgtccctccaggagctgtacagtgaatgtctataaacgtcacggcaggggcgctgacctttgcaaggcttcagcagttgtgcttttttgtgaagactgttttggtagacactttgcctgcatttctgtaagaaaagaaatgtccagtgttagagtgagggagatttgggcaaatgcaagatggggtgtggggggtgcaaatgaaaaccatttcctaggctgctttatgttgtctctgagcaattgaatagccgtgcacagtggtgtgtgatagaggaagagaagaccatgttgaagaagctgtgttctgacccaaagcagaagcgagagaaagcaagcagctttgttccgggaactctctagactcccagttacactgtttcattctgatccaaactagattttcaaacgtgggtctcatgcatgaaatgacaataagcacattcctggatagggcaattacagataaaagctcaaattt

SEQ ID NO: 826 - DNA, 218 bp, Homo sapiens
taacaaggtgaaaccccgtctctactaaaaatacaaaaaattagctgggcgcggtggcgggcgcctgtagtcccagctactcgggaggctgaggcaggagaatggcgtgaacccgggaagcggagcttgcagtgagccgagattgcgccactgcagtccgcagtccggcctgggcaacagagcgagactccgtctcaaaaaaaaaaaaaaaaaaaaaa

SEQ ID NO: 827 - DNA, 195 bp, Homo sapiens
caaaaaacacactacagaaaagtgacagagcgagtttccttagaagttctgatttagtctgtgatgggatttgggttgtaggcatttcacactcagaaaccctggcttgtttctccagtattgagtggatatttgagtttctgagttcatcattgttatacatcttaagcaggtgtgccccatatgtcctctact

SEQ ID NO: 828 - DNA, 224 bp, Homo sapiens
tgaaaccccgtctctactaaaaatacaaaaaattagctgggtgcggtggcgggcgcctgtagtcccagctactcgggaggctgaggcaggagaatggcgtgaacccgggaagcggagcttgcagtgagccgagattgcgccactgcagtccgcagtccgcagtccggcctgggcgacagagcgagactccgtctcaaaaaaaaaaaaaaaaaaaaaaaaaagaa

SEQ ID NO: 829 - DNA, 195 bp, Homo sapiens; identical to SEQ ID NO: 827

SEQ ID NO: 830 - DNA, 339 bp, Homo sapiens
gagctatgataatgccactgcactccagcctggatgacagaaagagaccttgtctcaaatacgagagagagagagagagagagaaataacagttacaataaggctgtctggcagcactagtggattctgcagtgataagggaaagagtaacactattttctgataaatccttttatgttccatcacctttaagggtgaaatagggttttgttttgtcaataaaaatgtcgacatgtccccccactgccacggtgagaagggaccacgtcctgaggcccagcaaagtcccagtcttgcagacatgggcaagcctctgggaactttgggttgcctgtgaaa

SEQ ID NO: 831 - DNA, 339 bp, Homo sapiens; identical to SEQ ID NO: 830

SEQ ID NO: 832 - DNA, 730 bp, Homo sapiens
gagacggagtctcgctctgtcacccaggctggagtgcagtggtgtgatctcagctcactgcagcctccgcctaccgggttcacgccattctcctgcctcagcctcccgagtagctgggactacaggcgcctgcccccacgcccggctaattttttgtatttttagtagagacggggtttcaccgcgttagccaggatggtcccgatctcctgacattgtgatccacccgcctcggcctcccaaagtgctgggattacgggcatgagccaccgcgcctggcccaccacagttttaattctgaagatgcagtattaagagaggaggctaaagaagcacacacttgcttaatttttccttcgttatatgctggggatggcagcagcagcttgtggctgagtttcggtgttctgcctgacgggtgacagctgagcaggcactaggtccttgcaaaacgcaggatgctggggagggtcttcaccttgcatggtgtcctgtcccacactgctcctcaggttgggagtggtggggagttactgtttaatgtgtacagaatttctctttgggatgacaaaaatgtctggaaatggatggtggtgatggtcgtagagctttacagatttacttaatgccactgaattatacacttcaaatgattaaaatggtaaattttatttatcttttgccacaattttttttaaaacctcagtaaataaaatgcaacttaaggctt

SEQ ID NO: 833 - DNA, 90 bp, Homo sapiens
gtgaaaccccgtctctactaaaaatacaaaaattagctgggcgtggtggcaggtgcctgtaattccagctactcaggaggctgaggcagg

SEQ ID NO: 834 - DNA, 90 bp, Homo sapiens
gtgaaaccccgtctctactaaaaatacaaaaattagctgggcgtggtggcaggtgtctgtaattccagctactcaggaggctgaggcagg

SEQ ID NO: 835 - DNA, 624 bp, Homo sapiens
aacctccacctcctgggttcaagtgattctcttgcctcagcctccagagtagctgggatccagaacttctaatggaatcattccttcaggtctaggatttatgattctaccttattttagggaaaacacctcattactacaatgaattttaatatactgtaagataaacatgcggtataattttggacaaccacattccgtatcaaatctctaacggttttaactagtgacctttgttttatttctttattacatttaaaagcaaagaggaatgtgatgcctaaaaatactggactaacaagccagaccaagccaggttagttggtatgaatcatgtacaactttcaggtaagaaataatctcttccacattctctatgaagcaaccccaacctgaaaactgtaggtgtgtgcacggccagtagccaaaatccatgataaaatgatttcaaaatcatgctaaaagctaaatatttcatttcattatcaaaatttttatgtgaatgtgatcaaaactgttatcaaaatttaatggaaagtttttttgaacttctataatcatactccaaagtaaagcaacaataccacagagattatagtaacaacaaaaaaaaaactatttttt

SEQ ID NO: 836 - DNA, 653 bp, Homo sapiens
catgtggccccaaatggtatttaatctagaaatcattttgacattggaatatggatgcgtcagatactccatgaattcataatgctttcaaaaatataatgtgcccacactgtgatggactgactggggcagagctgaaaatggttaacatctgtcatccagcttttcaattctccatccccgtctttcaggccaatgtaagttagtcacacaaagtcaagcttccctctcctttgccaaatgttttgactctcacctcccgctggtaggaggaataaataatgttttaaaaggactcctcctcctgcggcttttgtggaactatagggtaggtcactggtacgagaaaggagaaacagcgtgggtgcggtgactcacgcctgtaatcccagcactttgggaggcctaggaaggtggatcacttgaggtcaggagttcaagactagcctgaccaacatggtgaaaccccgtctctactaaaaatacaaaaattagccaggcatagtggcatacacctgtaatcccagctacttgggaggctgaggcatgagaatcgcttgaacctaggaggtggaggttgtagtgagccaagttcacgccattgcactccagcctgggcaacagaatgagactcagtctcaaaaaaaaaaaaa

SEQ ID NO: 837 - DNA, 396 bp, Homo sapiens
taactgtgcagtaattacctagaaaatcaaaagaaatcaatctgaaaattactacagatagtaattgaagttagtaaaatgcaagatagaagataaagccacaaaaataagcccctgtgtattaataaagtacagtcattccttggtatctgtgggagattggttccaggacctccctcagataccagaatcctacataaaatgatgtagtattttctcagggtatgctgaagttataaaaataaataaataataaaattaaagtggtatagtatttgcatatagcctatgcacattctcccgtgtactttaaatcatctctcaattacttacaatatctagtaagtgtaaatgcgatgtaaatagttattagactgtattgtttggagaataatg

SEQ ID NO: 838 - DNA, 1559 bp, Homo sapiens
gcggcggcctcagcgctggcccgaggggaccagatcgccggccccagtgagcggcatgcagcgctgaggaacggcgacccagcagggcggcgccatgaacctcctgccatgtaaccatcaccgcaacgggctgctgtacgctggcttcgaccaggaccacagatgctttgcgtgtgggatggaaaatggattccgagtctataacgctgatccactaaatgaaaaagagaaacaagaatttctaaaggaggagttggccatgttgaaatgttatttcgctgcaactatttagctttaattggtggtggaaaaaagccaaaataccctcccaacaaagtaatgatctgggatgacctgaagaagaagactgttattgaaacagaattttctacagaagtcaaggcagtcaaactgcggcgagatagaattgtggtggttttggactccgtaattaaggtgttcacattcacacacaatccccaatggttgcacatcttgaaaacctgctataaccccaaaggcctctgtgtcctttgtcccaatagtaacaactccctcctggcctttctgggcaccacacgggccatgtgcaacttgtggacctggccagcacagagaagccaccagtggacattcctgcacatgagggtgttctgagctgcagtgcactcaaactgcagggaacaagaattgcaactgcatccgagaaagggacccttataggaatatttgatacttcctcagggcatttaattcaggaactgcgaagaggatctcaagcagccaatatttactgcattaacttcaatcaggatgcgtccctcatctgtgtatccagcgaccatggcacagtgcatatttttgcagctgaagatctaaaaaggaataaacagtccagtttggcctcagccagtttccttccaaaatacttcagttacaagtggagtttctccaagtttcaggttccctcaggctctccgtgcatttgtgcctttggaacacagccaaacgccgtcattgcaatttgtgcagactgcagctactacaaactcctgttcaaccccaagggggagtgcatccgagatgtctacgcgcagtttctagagatgactgatgacaagttgtgactcccctgctgggggcgccacagcacccaccacctgccgccttcaggctctcggggctggtgccagagccccaggggcctcctgggccacgggctggaggggctgcccagggaccttggtctcgaagccttaggtggttgtctgctttcctaaggactcccatttccagtattaaagagagaatcatcatcaaggcaccgtaggtactcagtgctgtgaccagcttgagtggccgctggctgttcccatgagttcagctgtgatgttagcttcagtggctccaccgcatcctcacgctgacgggggctccatacggacctgggaactgggctgagagggtggatgagttcaagtttgtttttgcaacagattccattgttcttactgagtctgcagcggggaagtgaacaagtgtgcaaatgtaagttctta

SEQ ID NO: 839 - DNA, 2499 bp, Homo sapiens
gcggcggcctcagcgctggcccgaggggaccagatcgccggccccagtgagcggcatgcagcgctgaggaacggcgacccagcagggcggcgccatgaacctcctgccatgtaaccatcaccgcaacgggctgctgtacgctggcttcgaccaggaccacagatgctttgcgtgtgggatggaaaatggattccgagtctataacgctgatccactaaatgaaaaagagaaacaagaatttctaaaggaggagttggccatgttgaaatgttatttcgctgcaactatttagctttaattggtggtggaaaaaagccaaaataccctcccaacaaagtaatgatctgggatgacctgaagaagaagactgttattgaaacagaattttctacagaagtcaaggcagtcaaactgcggcgagatagaattgtggtggttttggactccgtaattaaggtgttcacattcacacacaatccccaatggttgcacatcttgaaaacctgctataaccccaaaggcctctgtgtcctttgtcccaatagtaacaactccctcctggcctttctgggcaccacacgggccatgtgcaacttgtggacctggccagcacagagaagccaccagtggacattcctgcacatgagggtgttctgagctgcagtgcactcaaactgcagggaacaagaattgcaactgcatccgagaaagggacccttataggaatatttgatacttcctcagggcatttaattcaggaactgcgaagaggatctcaagcagccaatatttactgcattaacttcaatcaggatgcgtccctcatctgtgtatccagcgaccatggcacagtgcatatttttgcagctgaagatctaaaaaggaataaacagtccagtttggcctcagccagtttccttccaaaatacttcagttacaagtggagtttctccaagtttcaggttccctcaggctctccgtgcatttgtgcctttggaacacagccaaacgccgtcattgcaatttgtgcagactgcagctactacaaactcctgttcaaccccaagggggagtgcatccgagatgtctacgcgcagtttctagagatgactgatgacaagttgtgactcccctgctgggggcgccacagcacccaccacctgccgccttcaggctctcggggctggtgccagagccccagggcctcctgggcacgggctggaggggctgcccagggaccttggtctcgaagccttaggtggttgtctgctttcctaaggactcccatttccagtattaaagagagaatcatcatcaaggcaccgtaggtactcagtgctgtgaccagcttgagtggccgctggctgttcccatgagttcagctgtgatgttagcttcagtggctccaccgcatcctcacgctgacgggggctccatacggacctgggaactgggctgagagggtggatgagttcaagtttgtttttgcaacagattccattgttcttactgagtctgcagcggggaagtgaacaagtgtgcaaatgtaagttcttacattataagcagatttaaatagaacaccagcagcttgccttagaaaaggagaaaggaattccttctcccgtccgaacatgaagaaaaacgacctgaccctgtagagagagcacagcgtgaatgtttccccttgtgtgagcccagcctgtggtcttctccgtacctgcaatgtggtcatctgtgcccgtaatgtcgtctgtgcccttgcgtggcatccccgtctctgttggggccattagaatgagatggacaccaggccaccgtagaagccgagctgtcagacctcaggcgtgtgcggggcggggacgcggggtctcctggttacattctgggttaaatctgtttcccggttatgtgtagggaacatcagagtgacgcacggactttgaacattcgttatgggggaaaacatcctttaacttcagggtcgtctggcagagcaggatctgggagggcccgctgtagtgcccgctgcagttcccgctggtgtagagggaaatgcctcggtctggcctccaagcccccaagtccactgtcttcccctcccctcatttgtaagaatagctacacactaacattttaggaaggaaaggcacataactttttttaacatttggtaactaaaataggttatgggctctacattgtcagctatttgggatatatatttaattttcttaaattcccgttaaagaaaccctattttatggttttgatttcagattgcaaacatataaaatctgcatagcagcgagttctcggttttgccagttccttcagttcctttactgttactgtcatgtaatcaactaactctgtatgtggattttgatgtaaagtatgcatgttccttttatgtgtatttaatcatgatgtttaattttgcacacttatttgtaatgtttcttttaaataaaagtgactaattttgttgtaaaaaaa

SEQ ID NO: 840 - DNA, 335 bp, Homo sapiens
ccctcgcattttttttttttttttttttttttttttgagacggagtctcgctgtcgcccaggctggagtgcagtggcgcaatctcggctcactgcaggctccgccccctggggttcacgccattctcctgcctcagcctcccgagtagctgggactacaggcgcccgccacctcgcccggctaattttttgtatttttagtagagacggggtttcaccgtgttagccaggatggtctcgatctcctgacctcgtgatccacccgcctcggcctcccaaagtgctgggattacaggcgtgagccaccgcgcccggccttccctcgcattttataaa

SEQ ID NO: 841 - DNA, 419 bp, Homo sapiens
  misc_feature (307): n equals a,t,g, or c
  misc_feature (324): n equals a,t,g, or c
  misc_feature (370): n equals a,t,g, or c
  misc_feature (406): n equals a,t,g, or c
  misc_feature (408): n equals a,t,g, or c
aatacatcaaaaattaccatttcatgtctatacaacatacagaattattaattagatattttacaatcttttacagtctttaaaatccagtgtgtcttttacatttatagcacatcttcatttggactagtcttattccagggctcaacagccacatgtggctaacaactaccctatcaggtagtgcagctccagagaatgtaggaaatatttaataatatagtttaagaaaagtttcttaagaggaaaatctaaatcttgttaactctaaaagcttatgccgattattagtgttgaattatgctangttataaagaccacctntcttgtgtttagacttttacgccaatttagagaatcagcaaagttngcattttatgtactgtgtcttcattaacgatgctgnanttacaactact

SEQ ID NO: 842 - DNA, 418 bp, Homo sapiens
aatacatcaaaaattaccatttcatgtctatacaacatacagaattattaattagatattttacaatcttttacagtcttcaaaatccagtgtgtcttttacatttatagcacatcttcatttggactagtcttattccagggctcaacagccacatgtggctaacaactaccatatcaggtagtgcagctccagagaatgtaggaaatatttaataatatagtttaagaaaagtttcttaagaggaaaatctaaatcttgttaactctaaaagcttatgccgattattagtgttgaattatgctaggttataaagaccaccttcttgtgtttagacttttacgccaatttagagaatcagcaaagtttgcattttatgtactgtgtcttcattaacgatgctgtagttacaactact

SEQ ID NO: 843 - DNA, 768 bp, Homo sapiens
agtaattattgtagtaggttgtagcggattcagtaaatatatccagttcctattctatattctttctaggtgttaggaatgctcccaggaggtacaaaagctatcagtcgctgcaccgaaggactctaggatgctatgacttagtgattatctctgccttttgtaatttctctctctcccccttcactaactgacaatctattgtccttactgttactagcatagctgccactaacattctcctcatcttctgatgggtaacttccagtctagtgcggactgggaatccagatagcctcacttgtcacaattctgtctaaagtaaacttaataggttctgggtaagggactaatgggctcaccaaggagtagggcgcacacacaccttagtgcatagactttgggaaagatatttggactactcaagtctatcttttaaatacattcctcttacttcttaaccaggttttggaccatggagattgcccagcaagccgagaatattccagccctccaacattgttgttaaaaagtccactgctgtatgttaggtgacttcccaaagctgctcactacttcttcttattctgttttctcaaccccacaaaaatccaatcactgaaatcctgaactcttttgatagtggcatgagtgttaagtaaattgcacacctcttgtggaattcattttcacttaatcatgctaattatgtggagacttgtttgttgttgttctttgtttttttaagtaaatcaatacctaaatttc

SEQ ID NO: 844 - DNA, 7973 bp, Homo sapiens
ctcactgtgaaccagatgcgtccaacagctcctgcccactgcccacctagcagggcacgtgtcccctcagccgatgtccagactcagtctagggaagagtgttttaggagctgtgacttcaccttggggtgaaggggtgaggtgaggggggcctcaaatgctaagtgaggggagtgagggggctctcaggggtgggtaggagctagaacgtagtggggaactggctgacgaggctggagacacagaagggcctcttaggcatggtgaggagtttggagtttgaatgttcccagagccctcgggagccatcagcaggtttgggacccggtgatgcaatctggtgttcgagttttcaaagcccccccaggctcatgttgagttttgggggcaggaggctgctgtgtgcggccaggtgatcccccgtggtggtctggtgggcagaggtgtgaggtggagagaagcaggtaggactgagagcagggtgagtgtggcatggccaccctggcctgaggtttcacctcccagaaagccccctcctggaagcatttggcgagtgtcaggcccagttccctttggacccaggccacttcaggcctcctgggtctgacagggaaatccttggggccttgaagcttctctcatctaggggccgagattcgggatagcaaaaggcaccactgaacacccccagaatcccacaacagcagaagggacctgccctgcctgccaccctccttcaccaggctccaattcccacgcagcctcccacccccaccccacagctgctgctgtgccccacccccaggttcctaacctggacgaccctctgcccacagagcccccattattctaatgaccagttagacaggaagagaatgttccaagtggctgctagaggccaaagctttgggacagaagaagaggaatgcatcgccctcccgccctccacttcctccctgcaccctcctgcgggggcagcagtcagagctgtcacaagatggaggtggaggaatgagccatgttcccagcctgccagattcctcaccccgaatgcaaacgcacctcctatgtgctttcctgggagctgcgctggcctgccccggggggactctgtctgacttcaccatgagctccttttcctcaccccgtccttcaacttcatcctatgtcagctgcagacaggctgaggtttgaatttggctctgtttactggggtgtcccagggcatgtgactttcctgccctgagtctctgtctccgtctttatgtgtggacccccgaagtgtcctcttcaccatgttcctcagtctgggatttgaggctctgcctgccctgtccgcttgatcactctgcttcagcctcccttctgccccttgaacataccaggctcctccccaccccagggccttggcttttgctattcttgcccctgcattacctgccacgatgtgccaggcctcctcctccaggaagccctcgctgactcccatcccatagcagtcctccttctcctgcactctgcctacctggccttatcatgctgcaaaattggccagagggcagacatctcccactcagagagttgaaggaaagagtctcaggattcatcccctcaaaacatccaccatctgtaggtctggctctatgtctttgttcatgtcctgtggctctggagacaccaagggggaaagacccagtttcccaacttgcttcctgcatgatcctgggcaagccactcggcttctctgaatcattagttgtttttccaacttttctaggcctggctctttttatttatgtttgtgttttttattattatcttagagacaaggtcttgttctgtcgcccaggctagagtgcagtggcgtgatcatagctcactgcagcctccacctcccagattgaagtgatcctcctgcctcagcctcctgggtcaccgggattacaggtgtccaccaccacgcccagcctagtctgaccaattgtgtaggtcacccgaatattcagttttgctccgagaggtggagacggaccccagtcattcagtgaagtggatggcagagcttcacctccagctaagtagccacattttctggcaacaaataaccttttttttttttttttttttttttttttttggagacggagcctcactctgtcacccgggctggagtgcagtggcacgatctcggctcactgcaacctctgccacccgggttcaagcgattctccaggttcaagccttagcctcctgagtagctcgtactgcaggcacccaccaccatgcctggctaattttttgtatttttagtagaaacagggtttcaccatgttgggcaggctggtctggaactcctgacctcaagtgatccacccgcctcatcctcctgaagtgctgggattacggatgtgaggcaccgcgcccggcctggccacaaataatctaattatgtcactgcccctgaaaatcggtcaccaaagggtctcatagccccaggccccaaggcctccccgctgagtgtgccatcaaacactgcagccttaaaaacccatggaccccagatgcccccagtcctgtccacccctttcagcgtcctgaagcttgttccgtggctcccactgcctgaaatcagcccatcgcccccatcgaagtccttcatgctccattcccctttcttggttccctccgccttgggagctggggacgtctaggtccggttccgtgtcccacgctttggagcagtagaaccaacgcgcggccagcgcatcttctgccaccagagggcgcccgcgcctcgggctttggctcccacaccgcggcccgccaggcctcgattcaacccgcgcgtcgcacggtgaaactgagggcatccccagctcaaggctgcagacgctactcgggggtacggggtgggagggtggcattgggaccgggttcagaagcttggcggaacatttctggctccatctgaggctctgtctctgtgtgtctctgagtgtcccatcccactctgtccccagcaccgcggaggcagccgccctggagcgggagctgctggaggattatcgctttgggcggcagcagctcgtggagctgtgcggtcatgctagtgccgtggctgtgaccaaggtacctgacccctgacccccaaccctgaccccaaccagacggccaactctcctgagctgcatgactgctgtgaccagggtggttcacccctcaagaactccctttttgcttgggcctaccccagcctgatgggtaaactgaggcccagagaggctcatggctggtgcaggccagatggggacctgagacccctggtatcagagaaggccagggtggaggttattgcagggacagtgccacgaccctggaagtgcaacccctcctgcacatgtgacccgcctgcttctgccacctcctgggtcttgggcaccagggacatctgctcctgcgatctgaacacccctaaacaaccctgttctgcaggtggggaaactgaagctcagaggtggcgaggggcctgccctgggtcagagggggatggaagcagagctgcaacccaggtgtgtctggctctggagtaaacccccacacctcgaggggccaggaggatgacacaagggtgatagcaataatcatactatggagtgcttcaccgtgcagccagcagtgctgggcatcagtttcctctgcaacagcataataaatggtactgacgagtcagtccctaaacgtgaacgcctcagaaaactgtcccatacagtcgaggctctagcgtgactgcctcctcttcctcccctgccctcctcatccccctcgcctttctcctccttcctcctcctcctgccccctcctcttaccctcctcctcctttctctctccctcctcctccccttccgcccctttcttctctcctttctccttcctctccctcctcctccccctcctcctgttctccttcctccttcccacttaccctacctcctccccatcctcctcctccccattctctccctcctcacccctcctcctctttttcttcttattaccacggtatactttttaaaaactcaatgtttttcttcatgtggacttaaatgtttgtatttccaaatgaaatagatcccgggtgaggcgcccaaaggagaaggaaaatcaaaaccccagaaagaaacccagtagtcactactcgcctggcgctcagtggccaactgtctggtttttgcactgaaagccccttgtctgtccagaagcccctcagtcccagtcttgggtcttgggctctgggcccggtgtggctgggatcgcaggcatgttcatggcaggtcaggactgcgctaagcctttggggaggatacttgaaaggggagtaatctgctgtctgtgtggttggagcttaaagtacagctggggctcaagagacacccagagtgcctgtcaggcggtggcactgtcatcgcatttgataaaggccaaactgagtctgggagagaaggggctggggccacgcagaatcagggcagggctggggccaaaatgcctggagagacagagtctgagagatacagagatggccagagacagatggagagagacagataacagagagatacagagacagccagagacaaatggagagagagacaaatggagaaagagagccagagacatacagaaagacagagacactagagtctgagagatacagacagacacagagacagccagagacagatggagagagacagagacacaaagagagccagagacacagagagtctgagagatacagacagacacagagacggccagagacggagagagacagagacagacagacagagacacagagagtctgagagatacagaaacagccagagacaggtggggagagagacatgaagagagccagagacatacagagagacagagacacacagagagacagagacacggagagtctgagagatacagagagacacagagacagccagagagagacagagaggccccagggcatcgtggctaaggttgggctcccctactccacagcctccaggaggggctgaggtctggaaacatgggcgggggtgggcccgcggtgagaaaggtggaagaatgtctgcaactcaggcggagaataaacaaaccgcactccgggcgacgggcagtggctggatgcacgtttttcctgcaccgacctggcagagcctgagaccgggcctctgcatctccagcggggaaactgaggccccaagaggcccaacccctcatccagaacagctcacctcctgtcctatcctgttgcctccaggcccaagccccatcccttcccctactccgggcctcagtttcctctccaggcaaggaggaatctggactgtgcctgtgcctttgctgtgtcccctaccaccaggcgttcccgttgcccgctctctcccggaagcagaggacggtgctggtcgtgtgtggcccggagcagaacggggcagtggggctggtctgtgcccggcacctgcgggtgtttgtaagtagcaaggaccccttcgacctcccaaagtccctgcccctgcagaaatcactgccttcttttgatagcttcccagggggacattgacgcagggccaggttatagaatatgcccagtgcttgtcccaggcagggtctggtgctggtgaccaggtcaggggagtctgaccccctcttctcccacccccaggagtatgaacccaccatcttctaccccacacgctcgctggacctgctgcatcgggacctgaccacccagtgcgagaagatggacatccccttcctgagctacctgcccactgaggtcagcgctgggtggcaagcaagggggacatggtgtgcagtggccctgggccaccctgaccctgcctgccttccccaggtgcagctcattaacgaagcctatgggctggtggtggatgccgtactgggccccggcgtggagccgggcgaggtcgggggcccctgcacccgcgcgctggccacgctcaagctgctgtccatccccctcgtgagcctggacatcccctcaggcatgccaggcagaggggggcacattggggcctggggggcttgggtggaggcccctgtgccccagctcctggtcgcccctgcctgtctgaacctcaatctccccagcttggatggacccacacttggctgaggctaagggtcacacccatccctctgatggggaagatcgaggctgccaccccaggtgaccccaggtctcctctttcctccaccccagtgcccagcccacatgccctctgcccacccctggcccagttgcctgggcagacgtgagctcactcggcaaaggccgcgcccgccctggctgccgccccatgcctgttggaaccattaggcgacaggcagacggaacaaacagccgctggccagccggaccctccgtgggggtggctggactccgggggatgtcccctggctctcgggatcccagggacatcccagcaggtgccacagagcaggggcaccaagggaggcggcgtgctgtctgatctgagtagggaggctgcaggctcagcctaggacagagagggtggctctgtcaggtcagaggggatggttaggaacctctagtctgagggtggtggctagggtcagagaaggattaaagtctgagggaggatccagtgtcttctggtgagtggccccagaatcaagtcagagataggagagaaggcaaggctcctaggctgaaagtggaggctcattcaagaggtgacggaggctgggtgcaggggtcacacctgtaatcccagcactttgggaggtcgaggtgggcgggtcacctgatgtcaggagttccagaccagcctggccaacatggcgaaacccagtctctacaaaatacaaacatttgctgggtgtagtggtgcacgcctgtagtcctagttacttgggaggctgaggcaggagaatcgcttgaacccgggaggcagaggttgctgtgagctgagatcgtgccactgcactccagcctgggcaatagagagagactgtatcttaaaaacaaacaggctgggcgcaatggctcacacccataatcctagcactttgggaggccgaggtgggcagatcacaaggtcaggagttcgagaccagcctggccaatatggtgaaactccatctctactaaatatacaaaaattagccaggcatggtggcgtgtgcctgtagtcccagctactcgggaggctgagacaggagaattgcttgaacccgtgtggcagaggttgcagtgagccgagattgcaccattgcactccagcctgggtgactgaagacagaggctgggtcagatggaggagggcgattgaatagtaggataggagcagaagcagaaagtctgagtgcagaagctctggtctgattgggagggaaacacctccaaggactgggagagacttgtctgagggcggaggcagagttctagggggcgacaagtctcaccaggacccatgtgccagagagaaaaggctgggtctgatgggggaggggaagtgggggtggggcagcaggactctggtctgagggcagaggctcagtgttggaggggagaggagaggaggcagggacaggatggactctaggctgagggcaggccaccctcccagttcccaatccccccggaccctcctccctcaggctgggacgcagagaccggcagcgattcggaggacgggctgcggcctgacgtgctggtgtctctcgcggcgcccaagcgctgcgctggccgcttctccgggcgccaccacttcgtggccggcaggttcgtgcccgatgacgtgcgccgcaagttcgctctgcgcctgccgggatacacgggcaccgactgcgtcgcggcactgtgaccgccacccgcggccacaccgcagggaccctcgccaataaacagccctcccaccaccgcc

SEQ ID NO: 845 - DNA, 102 bp, Homo sapiens
ggctcacgcctgtaatcccagcactttgggaggccgaggcgggcggactacctgaggtcaggagtttgagaccaacctggccaacatggtgaaaccccgtct

SEQ ID NO: 846 - DNA, 544 bp, Homo sapiens
aggcgcccgaagagcggcatttcctcaggtcagctggggagagggaagctggagacgggcatggttcccatggggccaggagcagcccgtaggaccggaggcagggtcatagctgggacagaatggggtccggggactggagacgggcacagccgggatggaggttcaacggcagaggcatgaccacggtggggaaccggaggcagggatatggccaagacgggcctgggaatcccgggaatccgagaccctcctggcatcttgctggagacactaagctgcgttgctggggaaactgcctccggggcagcccgcccctcatgaatgattcatcagcagcgctggtcgctcccccaccgaaccccaaccgtggcccacccccactctccatctctcccagggccttggagctgcagcccccacttgccgacatgggaagagcggagcttagctcaaatgctaccacctcccttgtccagaggaggaaacaggcctggggaaggcagtcatggctagagcagatttggaacgcagggcctgtttg

SEQ ID NO: 847 - DNA, 401 bp, Homo sapiens
ctgtggcctggtcttccaggcccagagtggcattgcaagcaccacccaaccccctttgtcactgtcgttgaaggaggcagaggccctggagactgagacaaagctctttgaggacttggagttccagcagttggagcgggagagccgcgtggaggaggagcgcgagctggccggccaggggctgctccggagcaaggctgagctgctccgcagcatcgccaagaggaaggtgtgccccacctcgttccctgctgcgtgctgttggaggccagtgacctgggtttgaatcccaatgacctcacaaaagttaacttcgtcttttgtgcctggatttccttgtctgtaaaatgagaattacaacaggttgttgtgagaattaaacaagatgtaaagacagaata

SEQ ID NO: 848 - DNA, 401 bp, Homo sapiens
ctgtggcctggtcttccaggcccagagtggcattgcaagcaccacccaaccccctttgtcactgtcgttgaaggaggcagaggccctggagactgagacaaagctctttgaggacttggagttccagcagttggagcgggagagccgcgtggaggaggagcgcgagctggccggccaggggctgctccggagcaaggctgagctgctccgcagcatcgccaagaggaaggtgtgccccacctcgttccctgctgcgtgctgttggaggccagtgacctgggtttgaatcccaatgacctcacaaaagttaacttcgtcttttgtgcctggatttccttgtctgtaaaatgagaattacaacaggctgttgtgagaattaaacaagatgtaaagacagaata

SEQ ID NO: 849 - DNA, 400 bp, Homo sapiens
ctgtggcctggtcttccaggcccagagtggcatttgcaagcaccacccaaccctcttggtcactgtcgttgaaggaggcagaggccctggagactgagacaaagctctttgaggacttggagttccagcagttggagcgggagagccgcgtggaggaggagcgcgagctggccggccaggggctgctccggagcaaggctgagctgctccgcagcatcgccaagaggaaggtgtgccccacctcgttccctgctgcgtgctgttggaggccagtgacctgggtttgaatcccaatgacctcacaaaagttacttcgtctttgtgcctggatttccttgtctgtaaaatgagaattacaacaggttgttgtgagaattaaacaagatgtaaagacagaata

SEQ ID NO: 850 - DNA, 743 bp, Homo sapiens
cgccgagctccagacgcagctcgataactgccccgagtcagtgcgggaacagttacaggagcagctgagaagggtcagttccaccgccccccctcccccggccccgcgggccacgccccagaaggaagagaggagagcggtgggacgggaccacctggcctctgcagtacctgccggacaccagggtcggtgctgcggtttggagggaaccgggaaggttggggaatcagcgctccaggccatgatgcccgcaaaagggcaaggccaagtacagcgggagctggggggaggcaggtttcttacccaatttccccgggtccagccccatacaacgcatgcaccctgtggcctggtcttccaggcccagagtggcattgcaagcaccacccaaccccctttgtcactgtcgttgaaggaggcagaggccctggagactgagacaaagctctttgaggacttggagttccagcagttggagcgggagagccgcgtggaggaggagcgcgagctggccggccaggggctgctccggagcaaggctgagctgctccgcagcatcgccaagaggaaggtgtgccccacctcgttccctgctgcgtgctgttggaggccagtgacctgggtttgaatcccaatgacctcacaaaagttaacttcgtcttttgtgcctggatttccttgtctgtaaaatgagaattacaacaggttgttgtgagaattaaacaagatgtaaagacagaata

SEQ ID NO: 851 - DNA, 292 bp, Homo sapiens
ggtgtctaaaattggtgacgtaggggatttgctggttagcctggggttggtggtaagtggggagctgctggactttccttgagtccagatcccatgcttctctccctgagctgctgtcttacaaacgcactttctggatgtaagactgactgatgaaaggagggaagaaaattgacacacctaagcacatgggtgtgtgtcaggcaccttgctgggagccttccttggattacctcaatgctgtccttaggacggtatcacaagacaagtgctgttattcccattttataga

SEQ ID NO: 852 - DNA, 261 bp, Homo sapiens
ggtgtctaaaattggtgacgtaggggatttgctggttagcctggggttggtggtaagtggggagctgctggactttccttaagtccagatcccatgcttctctccctgagctgctgtcttacaaacgcactttctggatgtaagactgactgatgaaaggagggacgaaaattgacacacctaagcacatgggtgtgtgtcaggcaccttgctgggagccttccttggattacctcatgctgtccttaggacggtatcaca

SEQ ID NO: 853 - DNA, 292 bp, Homo sapiens; identical to SEQ ID NO: 851

SEQ ID NO: 854 - DNA, 292 bp, Homo sapiens; identical to SEQ ID NO: 851

SEQ ID NO: 855 - DNA, 446 bp, Homo sapiens
tttttttaaaaaacataacattgcagtgtacagcccactgtctcctcttctccttccttcctcagaggtaactgctgtcaagtaaatgtataccccagggtgcttgcagcctcataggtcagagactctcaaaacttcttcccccatttatttatttatttgtttgtttgtttgagacagagtctcgctctatcacccaggctggagtgcagtggtgcaatctcggctcactgcaacttccacctcctgggttcaagggattctcctgcttcagcctcccaagtagctgagattacaggtgtctgccaccaagcccggcgaatttttgtatttttagtagagacggagtttcaccatgttggccaggctggtttcaaatgactgacctcaagtgatccacccacctcagcctcccaaaatgctaggattacaggcgtgagccacag

SEQ ID NO: 856 - DNA, 446 bp, Homo sapiens
tttttttaagaaacataacattgcagtgtacagcccactgtctcctcttctccttccttcctcagaggtaactgctgtcaagtaaatgtataccccagggtgcttgcagcctcataggtcagagactctcaaaacttcttcccccatttatttatttatttgtttgtttgtttgagacagagtctcgctctatcacccaggctggagtgcagtggtgcaatctcggctcactgcaacttccacctcctgggttcaagggattctcctgcttcagcctcccaagtagctgagattacaggtgtctgccaccaagcccggcaaatttttgtatttttagtagagacggagtttcaccatgttggccaggctggtttcaaatgactgacctcaagtgatccacccacctcagcctcccaaaatgctaggattacaggcgtgagccacag

SEQ ID NO: 857 - DNA, 268 bp, Homo sapiens
agaaacaattgtttctatttgtttttataaacagtggttggttaaccatccttatcaatgtctttgtgcccgcatgcaggagacctctctagcataggctcctggaagtcggattgctgggtcccaggacagacattcaaacttcgctccccaaaatggctattccaatttatattcccagcagcagtatgagtttcttttcctgaaaatcctcactggcacatggcattaccagacttctttttaaaatatgaaatattgagtacat

SEQ ID NO: 858 - DNA, 117 bp, Homo sapiens
tttttttttttttttttttgagatgaagtctcgctctgccacccaggctgaagtgcagtggtgcaatctcagctcactgcaacctccgcctcccaggttcaagcaattctcctgcct

SEQ ID NO: 859 - DNA, 268 bp, Homo sapiens; identical to SEQ ID NO: 857

SEQ ID NO: 860 - DNA, 117 bp, Homo sapiens; identical to SEQ ID NO: 858

SEQ ID NO: 861 - DNA, 3213 bp, Homo sapiens
ccaaggcagtcccaggctcgcgtaggaggcgcgcagaccttgcaccttgcaccttcgcagcgccctgcaccccgccaccatgtgcgagctgtacagtaagcgggacactctggggctgaggaagaagcacatcgggtaagggcaccctggcccggaagtaagtgcagagagggggcaataacgagtgcagaaggtggagagagaaagccggctagggaacaaacgatgcgctgcagccgcactccgtgcccgccgcgcctgtgcacgcgccccgcgcgcctccacctgcaggggccgcgcggactcccagaaacgctcctggaacccggaacgctgggcttcctgcccgctcgaaagtccccggctcgctctgcagccggcggactagcgggggctgccggccggctagaggggttggtggatgacggccaatagccctagcagacaccattccagggatgggagatgggtggaagaaggatagcgctccgccacccccacacaactcgaaagtttttggaaactgtgaactgagaaatattttttcatgatggctccgcaaacaaaccaattctgacaatttttacttaaagtgagctttttcttcttgcatgcttggttaagtgatgaagggtttatctagccaatagaaaaacttgaaaccaccttctgttagaaaagcagagactttatttagatccctcttacccaacttgctctcccaagctgtgttcttcccagcctgcttgtcttgcccccgtcacaaacgacttagtaatataaaggtgagtatataagaccgacaggggctctagctctcgttggatgtcatattccctgtgtggacctctgtcaaattaattgtctcttctatgaaagtaggaataacattctacttcacaggagcaagaagatgagattaatatgttagtgttttgtgcgtggtttttaaaaagatacgtgtaaatataaatgatgattaatgaccccgaatactgtaaagtcaaccgtctgcaatattcacttgaaatgaacgactgcagccgggccagtgggcatgagagagcacttggggttacaaggaagaaaacaatccgcatcctcttcggaggaatgctggacagtttctcagactgaagctcctcaccccaactggaggggtttctgggtggtttggaagactagttccatctctctcagccgctaagtgggatcaaaataatccagttctttccccattaatcaatcactaccctactttttctaatcactcactgcgttagttttcaatcttagttagattccggtaaatgcctaatggtttctgacatgagcagaacaaattttctaaaagcacgagtgtagccatgggctgactggataaaggagaattttacctgaagtctgacgggcaaggtggaaagtgtattaaaaaggcaatgtgaagtctgcagctttcagctcacatccttaacaaagtttttttttggattttaacttgtaggtataaactaacagctgagtttgaaccaataagaaattcttataaaatactattttcatttcagctgatgatgcttaaaaaaaatcaatatataacacaaccttatgcaattttaaaatttgaggttacctactgtttgtaataatcaaaattccttctaaacagttacatatcaatttagtatatttctactactagaactacctccaatgtgtgtgagggtttttttgtatgtatgcaaaatcaccaaaataaataaatatatttaactttagttcttaaatgttcataaagccaagattagaagcctttgtgaaatttctatgtgctaaaatgtataatccagccattcatccaaataaaagtatggatgaccttattatgctcaaaaaacatattaaatgcttagaagaataattgaatttcactatttaataatggaaaatccatttgatactggacaagtaccactcaaaatacatgaaaatgaaaataatctataaaacttcctgcgtagtatttaactctaggttatttgcatttagctttcagtgctattcatgtctttatacattagattgaaggggaaacagagatgtctaccttgggctacagcacaacacagcctacttgcaaattctggttttctcatttactgtctgtgtagccttaaaccagttacttaatttctctgtgccttggtctcctcacctataagagtgagaaagataataacctctctttcataggattgttgacaggattaaataatatttacaaaatatataacagcttctgacacattaagccccccaaaaaaacttggttattttttttctgatagaacaaaatttctcaaaggaaaattagttattggtctgtgtgattagaaccatcagagagtggattcctgtgcctctaataaattgtcaaatcatggcatatttaatataacaagcataaggaatgtgaacaatgtcatgaatgggggattaacataaaagtttccaggtttacatgaaatgaaaagaaatgtatgtcatccaggttgtgttttccctttcctttatgtaactgtacttttccactgatggggaccttcattgagaaggaaaaatactgagagtagtcctaccagaccaaagtgtttcctttgattatttctaggccctcatgcaaagttttctttgcatcggatcccatcaaaatagtgagagcccagaggcagtacatgtttgatgagaacggtgaacagtacttggactgcatcaacaatgttgcccatggtaaatgtcctgtccttgcagtgctttggaggaaatgttcatggagtaaagctgacttggaacacttaatttttgtttggggaattgcagtggctgcagttcctttgctgagtgggccagtagtcctagtggggaaaatcgcagcaaaatatggaagagaaaggaactcaacttttgtttgtttgtttgtttgcttgcttgcttgcttcataattcctcttattcccaggcacttagaattctaacttatttcttgggcttttgtttcataaattttagtgggacactgtcacccaggagtggtcaaagctgccctgaaacagatggaactgctaaatacaaattctcgattcctccacgacaacattgttgagtatgccaaacgcctttcagcaactctgccggagaaactctctgtttgtt

SEQ ID NO: 862 - DNA, 1113 bp, Homo sapiens
atttggagaagataataaagcactggttctcttttattgttaagatctcagctgatgtgggaacattgtgattgcactataaattgctaaagtgaagaagagaacaaataacttcatttatttattttgtttgttttttagacagagtctcgctctgtcacccaggttggagtgcagtggcacgatttcggctcacttcaacctccccctcccgggttcaagggattctcgtgcctcactcagcctcctgagtagctgggattacaggcgcccgccatcatacctggctaatttttgtatttttagtagagacggggtttcaccatgttggccaggctggtcttgaactcctgatctcaagtgatacactttgcctcagcctcccaaagtgttgggattacaggcgtgagccaccacacctggtcatctttatctttttgacatgttcatcctcgtccccacactaaggtagagataaagcaattatcttctcaatgcttgaaacattttaagttgaattcattctatgattttctttagatttctccgcatatatcaatggaaaaaattaactatcttaatttctcatctatatagaaatgccagtgcaacaaaaccaaatgtagggttagaatatcagcaaggcaaagagagaagagaaaattcccagattatgaaatggagaagaagaacagaaacatgatatttagctcacaactctttcaacccattttctatacactccattattctttcttagaattcttacacaaatatttagtacaattttggaggaatagtagaaacattttatagtttttccttgtcctgtatcttcatctagccttcttttcagctttcctatgtcctttgttctccttttataaggagagatgagttgtacaataacatccattttcataagttatttaggtaaattattttgaagtatacatgttggatttccaaagcagctgtttttaattaaaatttaattaactaatttatgtcattatatatcttgtgttaagacaaccttaactttcttttagtaagattttacccaactgtttaccctaattatagacaattaaaatgttctctcttaaaaaa

SEQ ID NO: 863 - DNA, 1113 bp, Homo sapiens; identical to SEQ ID NO: 862

SEQ ID NO: 864 - DNA, 849 bp, Homo sapiens
aaataaaatataatacattacctatgtatcaaaaagcatgtgtaagaaagccaaatatgttaactgttctactttatttatgtaattatattttcattagtattttagtagatggggctgtatagaaaaacaaatgtatcatatgtagccaaatgaatctttttcttaaatgatattattatagtaggctacagtaatttcaacaattttacaatagagttttgatcctcttctttgcgatttgtttcaggagacacctcatgaatcacacaagaaaattagtctcagtacttatagccctatttcatttttcaattcagttttatcacaccatggcttcgaagtgactttgattgtgacccctaaagcaattatctgattaggggataaaaattcataattccaagatgtttctgaaaatgttctgaacaatgacaacatatttggaatgagggcgtaatttcactaagtgatgcttcgaagaacaatattcatttggatatgcaaacacacattttcaaaagttatattactgtgttaccatacctgttataaaataataaaaatatataagtatttattaagtcaaacttcagctactgcctgaaagtttagcatatgaaatttaaattaagtctttcagattatgattatgacaattgttcaacattttgtccttccttataactgagaaagcataacttaatataactactaagagaggcccattcattcttccagtgattctagaagaaatatggcacataatatcctttacttctaaataaaggagtcaatgactcagaaaataaagaggaaaaataaagtaaatgtgagagagatgaagaa

SEQ ID NO: 865 - DNA, 128 bp, Homo sapiens
gggcacagtggctcacacctgtaatcccagcactttgagaggccgaggtgggtggatcatgaggtcaggagatcgagaccattctggctaagatggtgaaaccctgtctctactaaaaatacaaaaaa

SEQ ID NO: 866 - DNA, 115 bp, Homo sapiens
gggcacagtggctcacacctgtaatcccagcactttgagaggccgaggtgggtggatcatgaggtcaggagatcgagaccattctggctaagatggtgaaaccctgtctctacta

SEQ ID NO: 867 - DNA, 847 bp, Homo sapiens
aaataaaatataatacattacctatgtatcaaaaagcatgtgtaagaaagccaaatatgttaactgttctactttatttatgtaattatattttcattagtattttagtagatggggctgtatagaaaaacaaatgtatcatatgtagccaaatgaatctttttcttaaatgatattattatagtaggctacagtaatttcaacaattttacaatagagttttgatcctcttctttgcgatttgtttcagagacacctcatgaatcacacaagaaaattagtctcagtacttatagccctatttcatttttcaattcagttttatcacaccatggcttcgaagtgactttgattgtgacccctaagcaattatctgattaggggataaaaattcataattccaagatgtttctgaaaatgttctgaacaatgacaacatatttggaatgagggcgtaatttcactaagtgatgcttcgaagaacaatattcatttggatatgcaaacacacattttcaaaagttatattactgtgttaccatacctgttataaaataataaaaatatataagtatttattaagtcaaacttcagctactgcctgaaagtttagcatatgaaatttaaattaagtctttcagattatgattatgacaattgttcaacattttgtccttccttataactgagaaagcataacttaatataactactaagagaggcccattcattcttccagtgattctagaagaaatatggcacataatatcctttacttctaaataaaggagtcaatgactcagaaaataaagaggaaaaataaagtaaatgtgagagagatgaagaa

SEQ ID NO: 868 - DNA, 1665 bp, Homo sapiens
acacttcaactttaaagaccactcccttagcttttggtaaagtagttgaataatctacaaaataggacttaaatattatagaaaaaaatcttaaaggccttctccttttatattataaaaattgcctatgtgatgatttttgagctataaaaatggcacttcacatggttcaaccaaataagttttaatgatcgctttatgttcttaataggcttctagtgtatttgcttttaggagtggttggagggtgtcgcatccattgtcttttattacttatatgtatattcatagtaaagataatctcctttctttaactttaaatgtgtaagacaaatctaagcttagattgtttgcgactctgaaaacaaaatccaagaattctttcttatttctttagaaagtctaggtcttgtttttatgcagacatctgtggagtttttgtcggtgaattcacacagtaaatgattgcatatggttccttctgtcagcttttagtttggatgctgaacagcctgattatgatttggattctgaagatgaagtatttgtgaataaactgaaaaagaaaatggacatctgcccattgcaatttgaggagatcattgaccgcctagaaaaaggcagtggtcagcaggtacaacttcatttgtatataacaagtatatacatattctatgtaaagatttgtattgtatggaaagagtgtgagattgcaggtagggggtaatcagtcaggctttagagttaaaaagtatgaattcaaatctcatctctgcttatcagtaacctgtgtaatcttgagcaatatgtttaaatttttctgtgccttggttgccctgggattgtcgtaaagatgaaataatgtatataaagcaccctagttcagtgactgacaggcataatgtactcctcaagtttcccatttgttaataatgttgtaatattgattattgtcctttaaatttagaagtaaatacttatgaaccttgtatgtgtattgtatgaaaatgacataatggttttacatttagccagtcagtctgcaggaagccaaactactgctaaaagaagatgatgaactaattagagaagtttatgaatattggattaaaaagagaaaaaactgtcgagggccatctcttattccatcagtaaaacaagagaagcgagatggttccagcacaaatgatccttatgtggcttttagaaggcgtactgaaaaaatgcagactcgaaaagtaagtgaatttgaagaatttttttgataattatataataaaaattatttatagttatgactgtctcaatactgtggtttaatttatattcaaatatgactttccaattataagaaaaatacttaaattgaacttaagatttattatgcagctattaatgttatattttaatgttaatccatttaaaaatcaatacaaaattgatttcctggtgatctgtgctcccttttattgtctttaaattctaatttaacccttcaaatatataaattttatgggtcaataactataccactagttagaaatacttactaacattaaacaagcaacttcacatttgcagaatcgcaaaaatgatgaagcctcttacgaaaaaatgcttaagctgcgacgagatctaagtcgagctgttactattctagagatg

SEQ ID NO: 869 - DNA, 1282 bp, Homo sapiens
cttgcagaggcaaaagggctcagacactcaggtccttgttaatgtcagagggaaagaccctgagctccttgattcatatgatagaaatcatccttttcagtcttgatgcagcccctgatatgttgggtgtgacttgccattgataatataatatctaccagaagctatggcaagtgtattttgatgcgaagcaaggtgatccttggcaagctcattttgttttaatgaataattaggctttgtgattgtggtttgacatgtgatacgatctaaagaagaggatgccaaactgtagtgtataaatgagatcctaaaaatgaaatataaccttaagaagcagaacattggccgggcgcggtggctcacgactgtaatcccagaacttcgggaggccggggcgggtggatcatgagttcaggagttcaagaccagccagcctggccaagatggtgaaaccccatctctactacaaaaaaaaaaactacgaaaattagccaggcgtggtggcaggtgcctgtaatcccagctcgttggaaggctgaggcaggagaatcgcttgaacccgggcggcagaggttgcagtaagccgagatcgccccactgcactccagcctgggtgacagagagagactctgtctcaggaaaaaaaaaaaaaagaacattgagaacattgctagttggtccctatcaatttggctttctggattattttcatcagtgctctttaatagaactttctatgatgatggaaatgttctgtaatctgtgctaatacaacactagccacatatagctattgtagtacttgaaatgtggcgattgtgactgaggaactgaattttaaattttatttaattaatataaattcagttagccgcacatggctagtggttaccatattagacaacatagacctgcattattttggttaggaacaaaatatatcaagtgtttttaatctaacagttttaatcaacttgaggatctctaaaagctgtttacgtaataatgacaaaatgagatgatggaaaatcattggagggcccatgattgcaggtactgtgagtacagagatgttaacatctagaaatttttatagtctgaatacttacttattttaataggaatgttatagaagtgatataggtcaaaataaaaaataaaacagtgaaataatacattcaactgtaccaatgtttttttacttccccaggccagacactgtgttaagctttaagcagagatggcagtatttggcagctaaatagtgccctttgtaccc

SEQ ID NO: 870 - DNA, 226 bp, Homo sapiens
tttgtttgtttgtttgtttttttgagactgagtttcactctgtggcccaggctggagtgcagtggcgcgatctcggctcactgcaagctccgcctcccgggttcacgccattctcctgtctcagcctcctgagtagctgggactacaggcgcccgccaccacgcccggctaattttttgtatttttagtagagacagggtttcactgtgttagccaggatggtctc

SEQ ID NO: 871 - DNA, 261 bp, Homo sapiens
tctcgctctgtcgcccaggctggattgcattaacgcaatctcggctcactgcaagctccgcctcccaggttcacgccattctcccgcctcagcctccctagtagctgggaatacaggcgcccgccaccatgcccggctaattttttgtatttttagtagagacggggtttcactgtgttagccaggatggtctagatctcctgacctcatgatccgcccgcctcggcctcccaaagtgctgggattacaggcgtgaggcac

SEQ ID NO: 872 - DNA, 118 bp, Homo sapiens
tcctgcctcagcctaccaagtagctgggattacaggcatgcgccaccacgcccagctaattttttgtatttttagtagagacggggtttcactgtgttagccaggatggtctcgatct

SEQ ID NO: 873 - DNA, 260 bp, Homo sapiens
ttttttttttttttgagacggagtcctcgctctgtcgcccaggctggagtgcagtggcgcaatcttggctcgctgcaagctccgcctcccgggttcacgccattctcctgcctcagctgcccgagtagctgggactacaggcgcccgccaccatgcctggctaattttttgtatttttagtagagacggggtttcaccgtgttagccaggatggtctggatctcctgacctcgtgatctgcccgcctcggcctcccaagg

SEQ ID NO: 874 - DNA, 168 bp, Homo sapiens
gggactacaggcacccgccaccatgcctggctaattttttgtatttttagtagagacggggtttcaccgtgttagccaggatggcctcgatctcctgacctcatgatccacccacctcggcctcccaaagtgctgggattacaggcgtgagcctccgtacccgcccat

SEQ ID NO: 875 - DNA, 238 bp, Homo sapiens
ttattattttgagacggagtttcgctctgtcacccaagctttagtgcagtggcgcgatctcggctcactgcaacctccgcctcccgggttcacgccatcctcctgcctcagcctcccgagtaggtgggactacaggcgcccgccgccaccacgcccggctaattttttgtatttttagtagagacggggtttcaccgtgttagccaggatggtctcgatctcctgacctcgtgatccg

SEQ ID NO: 876 - DNA, 143 bp, Homo sapiens
gctgggactacaggcacccgccaccatgcctggctaatttttttgtatttttagtagagacggggtttcaccatgttagccaggatggtctggatctcctgacctcgtgatccgcccgcctcagcctcccaaagtgctgggat

SEQ ID NO: 877 - DNA, 119 bp, Homo sapiens
ggtaggggggactacaggcatgcgccaccacgcccggctaattttttgtatttttagtagagacagggtttcaccatgttagccaggatggtctcgatctcctgaccttgtgatccacc

SEQ ID NO: 878 - DNA, 13371 bp, Homo sapiens
agttgccttgttgaaggggatgctaaagaagaaatactgcagccaccggaacctcatccagtgccacccatcttgacaccttctcccccttcagcttttccaacagtcactactgtgtggcaggacaatgatagataccatccaaagccagtgttgcatatggtttcatcagaacaacattcagcagacctcaacagaaactatagtaaatcaacagaacttccagggaaaaatgaatcaacaattgaacagatagataaaaaattggaacgaaatttaagttttgagattaagaaggtccctctccaagagggaccaaaaagttttgatgggaacacacttttgaataggggacatgcaattaaaattaaatctgcttcaccttgtatagctgataaaatctctaagccacaggaattaagttcagatctaaatgtcggtgatacttcccagaattcttgtgtggactgcagtgtaacacaatcaaacaaagtttcagttactccaccagaagaatcccagaattcagacacacctccaaggccagaccgcttgcctcttgatgagaaaggacatgtaacgtggtcatttcatggacctgaaaatgccatacccatacctgatttatctgaaggcaattcctcagatatcaactatcaaactaggaaaactgtgagtttaacaccaagtcctacaacacaagttgaaacacctgatcttgtggatcatgataacacttcaccactcttcagaacacccctcagttttactaatccacttcactctgatgactcagactcagatgaaagaaactctgatggtgctgtgacccagaataaaactaatatttcaacagcaagtgccacagtttctgctgccactagtactgaaagcatttctactaggaaagtattgccaatgtccattgctagacataatatagcaggaacaacacattcaggtgctgaaaaaggtaataatatagtgtcaaatacttaaatgtctttcctatgtgctagtcactgttttaagcactttagctgtattgatttattatgttttattccacactctaccatagaacctacagcaaaatctgtcttagatactaattttttaatataagcttttaatgtattgttaacaatttggtcacattatattactgggttttgtgtttctaaattattttagtagttataactggataacttattttctttttcttctgtattatagatcttagtgtttttgtatcggtcaaaaatttatctgactgaataattagaaataatttagggaagaatcacttaaaataacagtggcaaaaatactgtagaatgtcttgattggccatataatgttactcgtttttcctaaatgtttagtcattttttactgttcctttaactacagattacatttttttgtttgtttgtttttactgtcttcacaaatgcttccaaatatggctgcttccaaccctgagtttaacccaggaacaatactgcaaactgctcaattcagtagtgagtgggctatatgcatacctactcatcaaagctattatttaaagaattattatttttttagcactcttagcatttcaagataatgcatgcactcagttcccaaagtgtattattgcttcttgaaactcctctttgatctgctgaaagtaatgatggctaccatcttaaacagaccctaaggttgagagtaaacatataaatttgaaagctgtttattgatatattgattatcagtggtcacttacctatcagtgaactttggtagtgacacatacagactggtatttataacgtgcaggcaaaataagtactgtgaccttgaaagatttttttttttttttgagacttgcactcaaaagattttttttttgagtcttgcactgtcacccaggctagagtgcagtggcaagatctcggctcagcctcccaagtagctgggattacaggcacccactaccacacccagctaatttttatgtttttagtagagacagggtttcgatatgtttgccaggctggtctcaaattcctggcctcaagtgatctgcccacctaggcctcccaaagtgctgggattacagacgtgagctaccacacctggccttgaaagattattttctatttctgacccattatataccacccatactgtagtgcttgtattttctctcacacatactgtattttttaacttgagagagtgtatttggtagactagatgacagtctttttgagacagagttttgctcttgttgcccaggctgaagtgcagtggcgcaatcttggctcactgcaacctccgcctcctgggttcaaggaattctcctgcctcatcctccctagtagttgggaatacaggcatgcgccaccatgcctggctaattttttgtatttttagtagagacagggtttcactgtgttagccaggatggtctggatctcctgacctcgtgatccgcccacctcggcctcccaaagggctgggattacaggcgtgagccaccacgcccagccaggtgacagtcttaaactatttgcttaaattacagaattatcttttcttgatttatctttgttttatttgaaggatctttagaagataatgaatagtataatattactttaccagtttaccataattttaaattgctaatgtcttttgttcctcagcttcagaatttgaaatataactgcccagctgtaactatataagaaaatatgtagataagaaattttcattttgagtttttagtatatcaagcatgtggtattgtacctaggaagttttattgtttttttgttgttgttttgttcttttgcttttttttttaaaaaaaaccaaaaaaccattactggaaataggatttggtgagggccagaaagatgtatgatgtgatatgcttattaaaagttactactacatgacgagtctgttggtggctcatgcctgtaatcccagcattttgggaggctgaggcaggaagttcacttgagcccaggagttcataaccagtctgggtgacatagtgacacccaatctctacaaaagataaaaaactagccgggcatggtggtgcacacttgtggtcccagctactctggaggctgaggtaggaagatcacttgagcctaggagctcaaggctgcagtgagccataattgcgtcccggcactctgcctgggcaacagagggagaccctgtctcaaaaaaaaaaaaaaaaaaagagtaagatatagctaaaagcaccctactatgtgccagctcatttctgtttgtttggttttgtatttcaaagcaaaaatcactatacatgtgatttctggtttctttttactcaaccttaactatgttattggtttgattttaaccgaagattttcctgtgtgtaaatgttctttgttgcagcataactacaagtagtctcatttttaatgtgttgccaaatatttaccatatggattatttactttatagattgtttatttaccttatagattattatttcctttgtagatcattatcttatagagccattggcaccagaattagagttttggggggttttttggtcctagaacttgttagtgaattacagtcacacatttcttaatggcagggatatgttctaagaaaaatatgtcattaggcagttttgccattgtgtgaatgtcatagaatgtatttacacaaacctagatggtatagtatatactacacatctgggccatacaatgtaacctcttgctcctaggctacaaacttgtatagcatattaccatactcaacaattgtaacacaatggtaagtatttgtgtatctaaacatagaaaaggtacagtaaaaatatggtatcataatcttacaggaccgctgttgtttatgcggtcttgttgatgaaaacatcattatgtagtgcatgactataatggaatacttttgtattgatacctaaaaaaaacttttgcataagttactgcctgacaaaaattcttagctatcaattctaatttcagtcttgacttaggcctcctgaaagatttctcagattcaactacagaaggccccatacagtgtatgatttgcaaaagcctatataaaatacgcaatatctggttggataacctctaaaacaaaagtttttaacaggaaaggcagcccaaagttccagggagaaacatgcatttgcaaagcaagggccacgcttagaaaataaaagtttttaagggtgagaactgccatgagagaaaaagcacagagtttctggaagataactgatagaaaaagggctgaactgccctttttgttttgttcatttaatttaagaaatggtaccagaatgccaagattatgtgtcccttccttccaacagccatctcttcactgtgcgctgttagtagcaagagggcaaggagacatatggtgatgactcagactaccactactggataaggtagatagttctttagtggcaagagagagttctggtactcttggtagatgtatcaagtattggactggaactcctctttcaggaggacccagaagctgtattttcttgcgtctccagctaaataaatgtaggtggggcaaaagcaatcatactcacctcatgcgtgttgaaaattgacaagacctatgcatagccatcaggtgtggtaaaatagcagagtatcatggcagaactgtgtgttcatttaagaacaatgggcaaggctcaagacaaaataatacaggaccgtcgcatttctttttctttatcccaccctccccaacctgagagttcacacacaggattgtattcttatattttctttctattcctccagtgaaaactcaaagatcaaatacactcatttaccttaagccataataaagctaaccaatgaggcttacttaatgcactctctttcccaagagctaattttgtttttactagtgaaaaacctgtatatagcttcagtcagcattctcaaagtacagccatgtgccactgtacacaaaatctttagcaataaataaatgaagattttttaaaaaactttaatagctatatctttatctgttttggaaaaataactagtatttccaatgttatttcagttattgctgtttaagacatgactgaggtacacagttaagtttaaaatgagtcagattttaaaagtgaataggacacatgttacatagtatggcaaaaatcatgaaaggtgttaagcaattgaatcctgtttgggaaacactggcttaggcgtttcataacgcaaatgaccaaagctttcctttttggacacaaaacatcatcagtaagctcagtagagaagtcacttgccagctgacttctctactgaagattcccttcaggcttggagaactgaatgatgtctgtagagtgacaggaaagtcatgggagagagtcatttctgtatacattatctttgctcaataagcatcataattcttgataatgagtggaaaaggtttcttgcatttttttgcatttttaaaaactgatctagatatttgtgacaggaatttttagaatgtcaagaaagctctctgattttgtttagatgacatgttaatttgtctaaatttttatgtgtttaatttagatgttgatgttagtgaagattcacctcctcccctacctgaaagaactcctgaatcgtttgtgttagcaagtgaacatagtgagtgtctcttttgcttttacatttacttcatattctaataataaactccgaaaaacatacctgattttaatctattagctattgtgctacataattaaattcaaaaacaagtaaattgatgttgacatgcttttaattctttgtttgaaaaatgcttttaaattatattttttacttgctaagatcgatagaaattactgcatttatgttagatatcagaattcaattcatttaaatgtaattataggctgggcatggtggttcaagcctgtgatcctagcactttgggaggcctaggcaggtggatcacctgaggtcaggagttggagaccagcctggccaacatggtgaaactccatctctactaaaaatataaaaattagctgggcatggtggtggacacctataatctcagctacttgagaggctgaggcaggaaaatgacttgaacccgggagttggaggttgcagtgagccgagattgcgccattgcattccagcctgggcgaagagcaagatttcgtctcaaaaagtaaataaataaataaatgcaattacaaagccaggtgcagtggctcatacctgtaatcccagcaccttgggaggctgagatgcactgatcacctgaggtcaggagttcaagaccagcgtgaccaacatggagaaaccccgtctctactaaaaatacaaaattagccaggcgtggtggcgcatgcctgtaatcccacctacttgggagactgaggcaggagaattgcttgaacctgggaggtggatattgcagtgagccgagatcacactattgcactccaacctgggcaacaagagcgaaactccatcttaaaaaaaaaatgcaattataagtgtatttgcaatctggtgtattttcattcattaaaaatagcacttattgactcatgcctgtaatcctgccactttgggagaccaaggcgggcagatcacgaggtcaggacatcaagaccatcctggctaacacactgaaaccctgtctctactagaaatacaaaaaattagctgtgtgtggtggcatgcaccagtagtcccagctgctcgggaggctgaggcaggagaatcgcttgaaccccggaggcagaggttggagtgagccgagaccatgccactgcactccagcctgggcaacagagcaagactccatctcaaaaaaaaaaaaagtagcacttatttatgaaaacattaattgctttccttagatttaggtcagtaaacatttctgttgggtgggcgtcactggattggtgttaactgaaagacatttaacaccactggagtagactgagcacattggctcatacctgtaatcgcagcactttgggagtccaaggcgcgaggattgcttgagcctaagagtttgagaccagcctgggcaacacagtgatacctcctctcttctaaaaataaaataactgtccagttgtggtggtgggcgcctgtaatcccagctgcttgggaggctgaggcaggagaattgcttgaacccaggatgcagaggttgcagcgagctgagaccacgccattgcattccagcctgggcaacaagagcaaaaaactttgtctcaaaaaataataataacaacaaaaaattagccaggtgtggtggcatgtgcctgtagtccttgctactcaggaggctgaagaagaaggattgcttgatccctgtagttggaggctgcagtgagccatgatcgcaccactgtactccagtttggtaacagtgagaccccgtctgtggaagaaaaaaaaaagaccactggagtatcagaactgggagaaagtgatgatactttaaaacattgataatatacttctccctattaatcctctaaaaaagagtgcagaaacagcttgattgtatttacagtgtctcatgctcagtggaggtgctcacttgtctaagtacattttaccaatatattaattttgactgatttttgttttgtttcatttggttttctttttatttatttattttttatttattcatttttttgagatggagtctcattctgtcgccccggctggagtgcagtggcacgatctcggctcactgcaagctccacctcttgggttcatgccattctcctgcctcagcctcccatgtagctgggactacaggtgcctgccaccacacccggcttatttttttgtattttttttagtagagacagggtttcaccgtgttagccaggatggtccatctcctgacctcatgatccgcccacctcagcctctcaaagtgctgggattacaggcatgagccaccacgcccggctaatttttttgtatttttttagtagagacagggtttcaccatgttagccaggatggtctccatctcctgacctcgtgatcgcccgcctcagcctcccaaagtgctgggattacaggcgggagccaccacgcccggccttgttttgttttatttcgagttggagttccactctgtcactcaggctggagtgcagtggcacgatctgggctcaagctgttctcctgcctcagcctcctgagtagctgcgattagaggcatacaccgtcactcccaactaatttttttattagagatagggtctcaccatgttggccaggctggtcttgaactcctgacctcaagtgatctgcctgcctcagcctcccaaagtgaattttgactgattttaagataaatgttaaagagccaagcacaatggcttatgcctgtgatcccagcactttgggagaccaaggcaggtggatctctgttccatttgccctaggagtttgagaccagcctgggcaacatggcaaaaccctgtctgtataaaatcaaaaattagccaggcgaggtggcatgcacctatagtcccagctactcaagaagctgagatgggaagattgcctgagcctgggaggttgaggctccagtgagccgagatcgcgcctggtcaacagagtgagaccctgtctcaacaacaattaaaaagaatgttgaaagcaatgaaacggtatacttcagttgtctaagtctgtcacgttgtctgtagattaagcagtatacttcacttgtctgtcacattatctatagactgtaatacactgatgactgaatttatttacttaggttttgaaggaaggaaacagaatgttctcgaattaatagaaactacaattttttttttttagaaacttcagaaatatgcttacccagaaactacaaaatttttgtggaagcgatagtttctaaaatctttaggatctgttttttgtattactttaatgcaaagaaatttcagaaattcaaggtgttaataacaataagatttcatttttctcagatacacctgtaagatcggaatggagtgaacttcaaagtcaggaacgatctgaacaaaaaaagtctgaagtaagtccttttggaattggaacagttatagcttaacatttctactcttttgttaactaatcttgcagttgttgaaatagctgtcatcttaagatcgttaaatatagtttgtaatttttgatcggcatttcttatactaagatttcagatgaaaagcccatataaaaggtaggttctgaaattttttaaaagggtaacctgatctacatacaactatcactttaaagtattgttttctcaagctgtttttgaaatatgtaaattatgcttcaaataattttgaaggtatgaatgaaataggagttactattttcagggtcctaattctttcttacatttctagatgcttcccattataacactaggcacatagtcgcttcttttgtttttttctggctacctggcatttctttgacattcgagaaatgttttggcaattaaatattttgagggcgtggcatggtggctcatgtctgtaatcacagcactttgggaggccaagcagaaggatcacttgagcccaggagttcaagaccatcctgggcaacatggggagaccttatctctacaaaaatttttaaaattagccaggcgtggtggcgcatgtctatggtcccagctttttgggaggctgagatgggaggattgcttgggccccagaggtcaaggctgcagtgagccatgatcacaccactgcactccagcctgagtgacagagtgagaccctgtctcagcaacaacacatttgtccataggagataacattttttattaacattaatactttttgtattttctcccatactttaatatctctgaaatttagctacatcttatatttgattttaagacatgatgtagtttaattgacatataaaatacaataatgatataattagtaatagtggctggcaaaacacagctgtatgttccttcatgcagtagcccatgcttttcagtgctcatccagaaacatttactccaaggagaaatagcataacattttaaaattttaagcctaattaaaaaacaattgtttgcttttcctctgatgctgaaaatgataggccttgatttcttgggatatatacccataacagacccagctttctattatttgtatataaaatgaatgtattgtaataggtattaaatgtcttcctcgtagggcttgataacctctgaaaatgagaaatgtggtaagttgttagattttttttttcctttttactgtagattttattgattaatttctacaaaataacatgcttcatagttcatgctatatagttatttctgtatgtgaaaatgtctaggacaactcttgtagaagcttaatattgtactataattcttccaaattaattattaccaccagatagtagtattgatctggaaaatcatgggagcatttactatcaataattacaggctaatgggaaagagattttttaaaaatatttttctgttttttattttctgtttttaaaaacacctagaagttagatcccgacttaaataaatgatggaattgcttctgtagaaacctattgttttagaaatcttccttttagtactttttcatttatttgtgaagaccaataaaattgtgaaagaatgaatgaattttagtagttaacatcttttgttactaatcttaaacactggtaattaaagagtaaactacaatctaaacaacataaaactttaaaagtggagttattaggcctggcgtggtggctcacacctataatcccagcactttgggagacccaggcaggcaatcacctgaggtcaggagttcgaaaccagccttgagcaacatggtgaaaccccgtctctactaaaaataaaaaaaatagctaggcgtcatgccatctgcctgtaatcccagctactagggagactgaggcaggagaatcccttgaaccccggaggcagaggttgcagtgcgccgagattgcgccattgcactccaacccgggcaacaagagggaaactccgtctcaaaaaaaaaaaaaaaaaaacaagtagagttattatttcaaggtgcaaatagtgcattaattaaccctgaccttgttgatttcttaaaatttttttttttttttttttttttttttttgagacagaggtcttgctctgtcgcccaggctggagtgcagtggcgcgatctcggctcactgcaagctccacctcctgggttcacaacattctcctgcctcagcctcctgagtagctgggactacaggcgcccgccaccacgcctggctaatttttttgtatttttagtagagacggggtttcaccatgttagccaggatgatctcgatatcctgacctcatgatcggctcgcctcggcctcccaaagtgctgggattacaggcatgagccaccgcgcctggcctgaccttgttgatttctatacaaagacatttcagttgcaactattcccttagaacataggcatatagtatagctaccttaagggaatgtaatatgtcaagacctagatttatgaagtaagaataacgagaatcctcacattgcagaagtactcactgcagatttctgtgtgaccacaataatacctgacatgattttctgtgcacactacacttgtatttatattgttcttgacctgtaaaattatggtgcccaggagagaaagttttctcttttcatgcttgccaacatttaaaaaattaaagagttatatatatatgatgctacaaaggatggtgattaacaaaggctttgtgttgctacttagatcatccagcgggaggtattcactatgaaatgtgcatagaatgtccacctactttcagtgacaagagagaacaaatatcagaaaatccaacagaagccacagatattggtaatttgtttaataaataatttttagtaagtagttaacactggcaggaatgagaaaagctcatttgccattgtgaaatgacacttgccaagaataaaacatgattttccaaagttgcttggactagtcatgaaataaatgaaatacttaattctatttcacattgagattaaaaactaaaatagaaaactgcagtataaaaaatcttttgtgttggaaagactaaattatcatggatatttttcttacattgtgataaaattggttttatttccagcataagatttttaaaagaagcaatcattttcagttattccaaataaatttacaattgttttgcatttaccaagttttgtttggcttaaattctaaattcccttgtggaaatttatttgttccagaaaatgagaatgtctgtggacatggtttttagtagtttgaaagtatttctgaacactgactagttattgtggtgttttcactgtaggttttggtaatcgatgtggaaaacccaaaggaccaagagatccaccttcagaatggacatgattcagggagctagaagacactttaagttatactggaaaattcaggtgccactgaaagccagatttatagtattccatctttaatatgtgggactaacagcagtgtagattgttaccttaatattttttgctgggaccatctacctgccttatactacacttaggaaaaagtattacatatggtttattttgaaacttcaagtattattgccttaatgtctcttaaccctgttacacgctgcttgtagacatgttaatatagtaatacctttatgatatattgagtttaaggactactctttttctgttttatcatgtatgcattattttgtatatgtacagggcaagtaggtatataatttgataaagttgcaattgaaatattattaacagaagatgtaagaaatttctgcatggtctaaatctttgtgtactttatttgtaaattatttgccctggagttttagaaaatagtttctgaattttaaacttgctggattcatgcagccagctttgcaggttatcagagatcaaagattgtaataataattttgtaaattgtaagcaaaaagttatttttatattatatacagtctaattgttcatcctaattgttcctgttttcatctagtcagagattcagtaagtgccttggaacaatattgaattctcttagcttgtgtgtgtttctttaatatttgaactcaagtgggattagaagactatcaaaatacatgtatgtttcaggatatttgacctgtcattaaaaaaaacaaacagttttacagtgccta

SEQ ID NO: 879 - DNA, 264 bp, Homo sapiens
ggagacagtcttgctctgtcgcccagactggagtgcagtggcgtgatctcaactcactgccatctccacctcctgggctcaagcaattctcctgcctcagcctcccaagtatctgggactgcaggtgtgtgccaccacacctggcaaatttttgtattattagtagagatggggttttactgtgttgctcaggctggtctcaaactcctgagctcaattgatccacccaccttggcctcccaaagtgctgggattacaggcgtg

SEQ ID NO: 880 - DNA, 301 bp, Homo sapiens
atagtgaggccccgtttctacaaaataatatttttttcaatgttgactttatttcttagctgtgtgacttccagcaaattctttaacttcattgaaactcagttttttcagctataaaattaagagaataaataaactgtcccattgtatgatgcaaggattaaatgagatgacagcaactaaaggcctgccaccatcaactcttggcaatttatttccctcctaaattagatagaaatgtcatggtttggggtttccattgtgtgttcaagaaagataagaccgtaacgcctttcttaaa

SEQ ID NO: 881 - DNA, 421 bp, Homo sapiens
aatttaaggatatagaattttctaataaaaacaaccagagtgcactaggcacgattattccaacctatctttctattgtattggtccatctactttgccgatttccaaaggaattagagacggctttattacatttaagataatatgaaagaagacaagtatagcccctctttgatttttatgttacacattgggcagtaggtttttaaagagccgtgtttgactctgtcctattttggggcccaggtacatgattcctatttttagcaactctctggtattgtgaatctgagatttcaaccaccagtgagtcagaaggtctggctgcccagagatatgtgactcagacaggcaggaatagtctgttcaccatgagatgagggcttaaaggggagcttttgtgcttagtgaaacacgcaaa

SEQ ID NO: 882 - DNA, 6318 bp, Homo sapiens
tgttcctgcaactgcagatcctgagtcagcagaagcagcactacaactaccagaccatcctgcctgcaccattcaagtacggcggggcccatgctatcctcaacgcggggttttctgtggttttttatgaggaactataagttaccaaaagttgaatgttgtcatttatttgtgctcagtaatgattttcatttctttgttatcagagcttatcacacagtgtctgaagtccacatggtgagagtggcctgcattccattccagtttctgtcctccaaaataggttctgaatttttacaagttagaaatgccttttcacaattattcatccagatttgcctattattagaacaccaaaatagtactagatgctctgagaaaagcgtaagtagtataatacctggcataaacagctaaaagaagagaaggatgggcatgaaagctggagtggtcaaaggaaagcctggtggaaaagacaggatctttgtatatagaaggctcgagaagggcctttccaggcacaggggaatgctgtgagcactagtacagaggaaggaatagagtaagtagtgcctcttcattggaaggtgagaaaaattgcctaaacaaagaatctgattaatttttaagtaaaaagtggaagacaaaaatagagtacagccaatgtctaaggggacttgaagctgggcagaagaccttactcaacacagcagatagacaacggagtgcttcagagcaggctgctgacgcagtgaggccaaaatataagaaaaaacagctggatgctggtgttgaagggacgtctggagacaatgaagagctctggcagcagagtgagtgtttcagaagacagttaaaggccttggtgacgaacaactgcggagaaggaaggtgttttcaaagtttgaacccaactgtgggggacggaagggagtgaattctgacaatttctgaaactgaattcacagcaagacatcaatggctaattttaattacgtaataaagaaaatttctggatatacattcccaatatgctttttctgggaaacagagataaaaatgcaaagatcttgtcttcattttcctcacttttcatgaaaaagaaatatttgcatttaactctagaaagagatgcaaaagctcattataatgaaaaattattagccatgatcaggttattcaacttatgattatacgacctgtagaaacttctgctttctacatgtcgcgtaagcattccctcataggtagcccctcttttccctcttaagattcaaatatcttgaggaagattaaacctattagtaattcagacctgattgtgaagtacttaaatctaaaacatcagggcatggagatgaagagagaaagaactttgtatccagttactattttaagagcaggcaggcccgagtgagctattgacattggaagggaatcagggataccaaagagaattggaagagaatcacagacaagctgctgctactttgcagctttgtccaggccttagggaggcctcctccactgccatcctcctttggcattgggcaccaataataataataataataataataataataataataataatggtaatgatgtctcacagttactacttacaatgcgttgtgcttaaaaccgtgcatcatcctcatcctcgcctcaagtctaggaggaattgctgttattgaccccattcccagatgaggacgctgttataaaaaaaaatcctttgggattttcaccttatctttgaaacagtcttttctgtaatgaaagaatttggctgtgcgactggctttgtagataggaagaatccatcagaggtgtgggcttgctgaactgttaccagttctttgtctttccattaaggcttcaattcccctctcctcctcagacattcagcacctctacaataaccaagctcacccaagaatagtatcatacaaaaagacccaggatattagaaggagaaagaacacttatttttgtgtattatttaaccacaaaaagaatataagtcctgttcaatttccagatcctaaaaatggaggcctgtttcctaacgcattgtttatatttatcaaaattccattacaagaaactgaatgtggaagtcatagagtgcccatagtggtgggagtttacctgaatcatgtagccctttgccaccacaaaggagcaagcgcccaaagggactaggctttagtccagcccagcttgtctgcacaatgggaggtcactggaggtccccgaaggccactgcatccctctgaacgcaggtctctcatctgccgatcacattcgttagcaacctctctcttttttctcccctctattgatttgggagaaaaatagattaacatgtttctgttattttaaagattgagttaaataccaaactgttcattttaataggtagagtattatagaatctcaacaggaaaaaaaaaacatcctgagtagaataattacattcattttcaagggggtaataccactcacaaggaagcaaaaggtggctcagcagggagactactcttacgtaataaagcacagacttacctgcggtccataaacacatgctttatctctgtggtgttgaaacttcatggggagagagatgtggagaaaaatgtctaaaaggctctttcgggggacaataatgaatgaaaataaggtggagaaacactgatttaaagaaaatgttttcataactctgagattttacagttgaatttttataaaggataataatgatgcataaaatatttgccacttcatccaatgataagaaacttcatcccaaagatttcaattatttaacttcaacaaaattcagccaggttttagaagaccccaaaatgaatgtcaagagttagctagtgacaaagccagcattggcttcaaccacaggcttcccagaactcttcagagaaagctcacccaactatggctgtcaccccgtaggcactgtcacctcaaatccctgtttcagaatgtggaattccaagtctcttggcttcagcaccaaggctttgtgtgataataaagcctgaagctgcaatggaatcggctgtacggtagcaaccatccagaaaggaaacaccactgttaccaagagtatcacagttggaagatgttaggtggggatctcgttttaatactgaaagtttagggaaattagtacaaagcacctaactgtagtagaatttgacaagtgatgcaccaacttcttttaagtaagctttttaaattgaagtataacttacacacagaaaagtacgtaaattataagtgaaaattgatgcaaaaataaatacactcctgtatccaatacccaaaccaagaacattttcagtaccccaaaagccccctttgtctcccttttccatgatcatcctgacttctatccccagagattagttttgcctgttttgggttttttttttttttttttttttttttttttttgagacagagtctcactctgtcgcccaggctggagtgcagtggtgcaatctcggctcactgcaagctctgcctctcgggttcacaccacctccagggttcacgccattctcctgcctcagcctcccgagtagctggggctacaggcgcccgccaccacgcctggctaattttttgtatttttaagtagagacggggtttcaccgtgttagccaggatggtctcgatctcctgacctcatgatctgcccgcttcagcctcccaaagtgcagttttgcctgtttttgaacttcatatacacgcaatcttacagtacacctacgtgcatctttgttggtgctgatagcagttcatttttgttgttgttgtttaatatttcgtgactgactataacataatttagccatccagcttactcttgatgcgtagttgggttgcttccagttggggctattaggaataaccccacagtaaatagtctgtgtcttttggtatacatacatgtgtctttctgttagatgtcttatctaggaatggaattgtgggatcataggataggcagatgttttcctttagtactacgaaagaaaagtttcaaagaaaagatgtttttctttagtacagttttgcaaagtagttgcatcattcacagctctgccagcagtgtgtgattgttctggttgtcccaggtacttggtatcagtcttactcattatatcaattccactgaaaatgcagggctattctgttgtgatttgcaatttccacatacctaatgaggttgaatcatctttcacttatttattgaccattgggatatacattcttgtgatacatctgagatttttccccccacttttccactgggttttctgtctctttcttactgattttaaagacctttttatatactctagatatgaggtctttgtcagaaatatgtattacagatatgttgtcctgcactgtggcttgacttttcactgtcttaaagatgtcccttttacttagtgctttttatgtgctgtttaagaaatctttgtctacccaaaggccatgaagatactatcctgagtgtttttctgaaagctttattttcataattcacatgtagattttgggaacaaggtgagatggggccagtcaagagccatgtttttttctgtgtgaatttccaacgtagcatggcaccattgaagtcccgccctctctccactacatcacagtgtcctctttttggtaactcaagggtccgggtatgcagagggccgtttctggatttgctggggctctctcatttgcctgttgttctgtccctgtatcagcaacatcacacattaattacgtgttgatgtctggtggtgtgactcttccagctttgcttttcttcaaggattcatggccattcttggtcctttgcatttccatataaagcttagaatcgccttctaaatttccgtcacgctagcaaacaaacaaaacctgcagggatttcattgagatctaatgtaattggcatctttacaatattcagccttccaatccataaccatggtatttttctcttcataagttagtcaaattgttaatagaagcaatgtcaaatctagaaattattttattataaactctaatttttgttttcttttgaaggccactcaatgacaaaaatagtaacagtgggaattcagctttgaacaatgccacacctaacacaccaagacagaatacatctactcctgtgagaaagccaggacctctgccttctagcctggatgacttaaaggtgacaattgcaactggagcttattcacccctaagtaccacaaacatgtaaatgatttgccagcgttgtctagcagacattaagtagttttcagtagacattcaactttaccaacaatatgataatctttataaaaggtattttctttttacttccactaagttttcttgtaaaacaaccaataactctcatttactgagtgtgtaccttgtgcaggcacctaccagttctgctggattccagaggctgtgatttttttcttccctgctcaatgccaagtttgggaaaagcaggaaaatgtaacagttaagaatatgagctctagggccagcctttttaggtttctaccacagctcagccttctattatctgtggtaccttcagcgagtgcttcagcctctctcttctttgcctcccgatctgtaaaatgggaagaataatgatacggacacctcatggggtcgtgtgaagatgagtggaaagagtagagcatttccaaaagtgtcttgcacaaggcaactactcaataaatgcagctgtatcatcatcataattcctggtagtatctctctgctttgacgtaaaagcggaattaccctctaaaaacccttaccgtatcactggctcctcaagtgcttctagtctgtagttatctgtttctgtgtgcttaaatataaaaccagttctactttcaggtgtgccgtaacgcagagttgtctgacagacataggcacctttcccatcacaaaagcgtactgtagatttgccagaaagctctaatactaagatatctgctttgtttgtacctccaggtatcagaactgaagacagaactgaagttaaggggtctgccagtgtcaggcaccaaaccggacctcattgagcgcctaaaaccctaccaggaagtgaacagcagcggccttgctgctgggggcatcgtggcagtgtcatcatcagccattgtcaccagtaacccagaagtcactgtggccttgccggttacaacactacacaacactgtgactagctcagtctctactctcaaggcagaattg

SEQ ID NO: 883 - DNA, 443 bp, Homo sapiens
  misc_feature (29): n equals a,t,g, or c
  misc_feature (66): n equals a,t,g, or c
ttggaaggtgagaaaaattgcctaaacanagaatctgattaatttttaagtaaaaagtggaagacnaaaatagagtacagccaatgtctaaggggacttgaagctgggcagaagaccttactcaacacagcagatagacaacggagtgcttcagagcaggctgctgacgcagtgaggccaaaatataagaaaaaacagctggatgctggtgttgaagggacgtctggagacaatgaagagctctggcagcagagtgagtgtttcagaagacagttaaaggccttggtgacgaacaactgcggagaaggaaggtgttttcaaagtttgaacccaactgtgggggacggaagggagtgaattctgacaatttctgaaactgaattcacagcaagacatcaatggctaattttaattacgtaataaagaaaatttctggatataca

SEQ ID NO: 884 - DNA, 6307 bp, Homo sapiens
tgttcctgcaactgcagatcctgagtcagcagaagcagcactacaactaccagaccatcctgcctgcaccattcaagtacggcggggcccatgctatcctcaacgcggggttttctgtggttttttatgaggaactataagttaccaaaagttgaatgttgtcatttatttgtgctcagtaatgattttcatttctttgttatcagagcttatcacacagtgtctgaagtccacatggtgagagtggcctgcattccattccagtttctgtcctccaaaataggttctgaatttttacaagttagaaatgccttttcacaattattcatccagatttgcctattattagaacaccaaaatagtactagatgctctgagaaaagcgtaagtagtataatacctggcataaacagctaaaagaagagaaggatgggcatgaaagctggagtggtcaaaggaaagcctggtggaaaagacaggatctttgtatatagaaggctcgagaagggcctttccaggcacaggggaatgctgtgagcactagtacagaggaaggaatagagtaagtagtgcctcttcattggaaggtgagaaaaattgcctaaacaaagaatctgattaatttttaagtaaaaagtggaagacaaaaatcgagtacagccaatgtctaaggggacttgaagctgggcagaagaccttactcaacacagcagatagacaacggagtgcttcagagcaggctgctgacgcagtgaggccaaaatataagaaaaaacagctggatgctggtgttgaagggacgtctggagacaatgaagagctctggcagcagagtgagtgtttcagaagacagttaaaggccttggtgacgaacaactgcggagaaggaaggtgttttcaaagtttgaacccaactgtgggggacggaagggagtgaattctgacaatttctgaaactgaattcacagcaagacatcaatggctaattttaattacgtaataaagaaaatttctggatatacattcccaatatgctttttctgggaaacagagataaaaatgcaaagatcttgtcttcattttcctcacttttcatgaaaaagaaatatttgcatttaactctagaaagagatgcaaaagctcattataatgaaaaattattagccatgatcaggttattcaacttatgattatacgacctgtagaaacttctgctttctacatgtcgcgtaagcattccctcataggtagcccctcttttccctcttaagattcaaatatcttgaggaagattaaacctattagtaattcagacctgattgtgaagtacttaaatctaaaacatcagggcatggagatgaagagagaaagaactttgtatccagttactattttaagagcaggcaggcccgagtgagctattgacattggaagggaatcaggggataccaaagagaattggaagagaatcacagacaagctgctgctactttgcagctttgtccaggccttagggaggcctcctccactgccatcctcctttggcattgggcaccaataataataataataataataataataataataataataataataatggtaatgatgtctcacagttactacttacaatgcgttgtgcttaaaaccgtgcatcatcctcatcctcgcctcaagtctaggaggaattgctgttattgaccccattcccagatgaggacgctgttataaaaaaaaatcctttgggattttcaccttatctttgaaacagtcttttctgtaatgaaagaatttggctgtgcgactggctttgtagataggaagaatccatcagaggtgtgggcttgctgaactgttaccagttctttgtctttccattaaggcttcaattcccctctcctcctcagacattcagcacctctacaataaccaagctcacccaagaatagtatcatacaaaaagacccaggatattagaaggagaaagaacacttatttttgtgtattatttaaccacaaaaagaatataagtcctgttcaatttccagatcctaaaaatggaggccttgtttcctaacgcattgtttatatttatcaaaattccattacaagaaactgaatgtggaagtcatagagtgcccatagtggtgggagtttacctgaatcatgtagccctttgccaccacaaaggagcaagcgcccaaagggactaggctttagtccagcccagcttgtctgcacaatgggaggtcactggaggtccccgaaggccactgcatccctctgaacgcaggtctctcatctgccgatcacattcgttagcaacctctctcttttttctcccctctattgatttgggagaaaaatagattaacatgtttctgttattttaaagattgagtaaaataccaaactgttcattttaataggtagagtattatagaatctcaacaggaaaaaaaaaacatcctgagtagaataattacattcattttcaagggggtaataccactcacaaggaagcaaaaggtggctcagcagggagactactcttacgtaataaagcacagacttacctgcggtccataaacacatgctttatctctgtggtgttgaaacttcatggggagagagatgtggagaaaaatgtctaaaaggctctttcgggggacaataatgaatgaaaataaggtggagaaacactgatttaaagaaaatgttttcataactctgagattttacagttgaatttttataaaggataataatgatgcataaaatatttgccacttcatccaatgataagaaacttcatcccaaagatttcaattatttaacttcaacaaaattcagccaggttttagaagaccccaaaatgaatgtcaagagttagctagtgacaaagccagcattggcttcaaccacaggcttcccagaactcttcagagaaagctcacccaactatggctgtcaccccgtaggcactgtcacctcaaatccctgtttcagaatgtggaattccaagtctcttggcttcagcaccaaggctttgtgtgataataaagcctgaagctgcaatggaatcggctgtacggtagcaaccatccagaaaggaaacaccactgttaccaagagtatcacagttggaagatgttaggtggggatctcgttttaatactgaaagtttagggaaattagtacaaagcacctaactgtagtagaatttgacaagtgatgcaccaacttcttttaagtaagctttttaaattgaagtataacttacacacagaaaagtacgtaaattataagtgaaaattgatgcaaaaataaatacactcctgtatccaatacccaaaccaagaacattttcagtaccccaaaagccccctttgtctcccttttccatgatcatcctgacttctatccccagagattagttttgcctgttttgggtttttttttttttgagacagagtctcactctgtcgcccaggctggagtgcagtggtgcaatctcggctcactgcaagctctgcctctcgggttcacaccacctccagggttcacgccattctcctgcctcagcctcccgagtagctggggctacaggcgcccgccaccacgcctggctaattttttgtatttttaagtagagacggggtttcaccgtgttagccaggatggtctcgatctcctgacctcatgatctgcccgcttcagcctcccaaagtgcagttttgcctgtttttgaacttcatatacacgcaatcttacagtacacctacgtgcatctttgttggtgctgatagcagttcatttttgttgttgttgtttaatatttcgtgactgactataacataatttagccatccagcttactcttgatgcgtagttgggttgcttccagttggggctattaggaataaccccacagtaaatagtctgtgtcttttggcatacatacatgtgtctttctgttagatgtcttatctaggaatggaattgtgggatcataggataggcagatgttttcctttagtactacgaaagaaaagtttcaaagaaaagatgtttttctttagtacagttttgcaaagtagttgcatcattcacagctctgccagcagtgtgtgattgttctggttgtcccaggtacttggtatcagtcttactcattatatcaattccactgaaaatgcagggctattctgttgtgatttgcaatttccacatacctaatgaggttgaatcatctttcacttatttattgaccattgggatatacattcttgtgatacatctgagatttttccccccacttttccactgggttttctgtctctttcttactgattttaaagacctttttatatactctagatatgaggtctttgtcagaaatatgtattacagatatgttgtcctgcactgtggcttgacttttcactgtcttaaagatgtcccttttacttagtgctttttatgtgctgtttaagaaatctttgtctacccaaaggccatgaagatactatcctgagtgtttttctgaaagctttattttcataattcacatgtagattttgggaacaaggtgagatggggccagtcaagagccatgtttttttctgtgtgaatttccaacgtagcatggcaccattgaagtcccgccctctctccactacatcacagtgtcctctttttggtaactcaagggtccgggtatgcagagggccgtttctggatttgctggggctctctcatttgcctgttgttctgtccctgtatcagcaacatcacacattaattacgtgttgatgtctggtggtgtgactcttccagctttgcttttcttcaaggattcatggccattcttggtcctttgcatttccatataaagcttagaatcgccttctaaatttccgtcacgctagcaaacaaacaaaacctgcagggatttcattgagatctaatgtaattggcatctttacaatattcagccttccaatccataaccatggtatttttctcttcataagttagtcaaattgttaatagaagcaatgtcaaatctagaaattattttattataaactctaatttttgttttcttttgaaggccactcaatgacaaaaatagtaacagtgggaattcagctttgaacaatgccacacctaacacaccaagacagaatacatctactcctgtgagaaagccaggacctctgccttctagcctggatgacttaaaggtgacaattgcaactggagcttattcacccctaagtaccacaaacatgtaaatgatttgccagcgttgtctagcagacattaagtagttttcagtagacattcaactttaccaacaatatgataatctttataaaaggtattttctttttacttccactaagttttcttgtaaaacaaccaataactgtcatttactgagtgtgtaccttgtgcaggcacctaccagttctgctggattccagaggctgtgatttttttcttccctgctcaatgccaagtttgggaaaagcaggaaaatgtaacagttaagaatatgagctctagggccagcctttttaggtttctaccacagctcagccttctattatctgtggtaccttcagtgagtgcttcagcctctctcttctttgcctcccgatctgtaaaatgggaagaataatgatacggacacctcatggggtcgtgtgaagatgagtggaaagagtagagcatttccaaaagtgtcttgcacaaggcaactactcaataaatgcagctgtatcatcatcataattcctggtagtatctctctgctttgacgtaaaagcggaattaccctctaaaaacccttaccgtatcactggctcctcaagtgcttctagtctgtagttatctgtttctgtgtgcttaaatataaaaccagttctactttcaggtgtgccgtaacgcagagttgtctgacagacataggcacctttcccatcacaaaagcgtactgtagatttgccagaaagctctaatactaagatatctgctttgtttgtacctccaggtatcagaactgaagacagaactgaagttaaggggtctgccagtgtcaggcaccaaaccggacctcattgagcgcctaaaaccctaccaggaagtgaacagcagcggccttgctgctgggggcatcgtggcagtgtcatcatcagccattgtcaccagtaacccagaagtcactgtggccttgccggttacaacactacacaacactgtgactagctcagtctctactctcaaggcagaattg

SEQ ID NO: 885 - DNA, 606 bp, Homo sapiens
tcgccttcacagttcttgagttcatctcctttgagaatgacaaataatgaagacagtctgagtcccaccagcagcactctgtcaaacctggaactggatgcagccgaaaaggatcgcaagcttcaggagaaagagaagcaaatcgaagagctgaagaggaaactggaacaagagcagaagctcgtggaagtgctgaaaatgcaacttgaggttgaaaaacgagggcagcagcagcggcccctggaagcccagcccagtgccccaggtcattctgtcaagtcagatcagaagcacggcagccttggctcctccatcaaagatgaggcctcactccctgactgctccagctccaggcagcccatcccagtagccagccacgctgtaggccagcccgtctctacaggtggccagacccttgttgccaaaaaggctgtagttatcaagcaagaggtccctgtgggccaggccagagcagcagagtgtcgtctcgcagttttatgtgagttcccagggacagccaccgcctgctgttgttgctcagccccaggctttactgaccacgcagactgctcagctgctgctcccagtgtccatccagggctcgag

SEQ ID NO: 886 - DNA, 605 bp, Homo sapiens
tcgccttcacagttcttgagttcatctcctttgagaatgacaaataatgaagacagtctgagtcccaccagcagcactctgtcaaacctggaactggatgcagccgaaaaggatcgcaagcttcaggagaaagagaagcaaatcgaagagctgaagaggaaactggaacaagagcagaagctcgtggaagtgctgaaaatgcaacttgaggttgaaaaacgagggcagcagcagcggcccctggaagcccagcccagtgccccaggtcattctgtcaagtcagatcagaagcacggcagccttggctcctccatcaaagatgaggcctcactccctgactgctccagctccaggcagcccatcccagtagccagccacgctgtaggccagcccgtctctacaggtggccagacccttgttgccaaaaaggctgtagttatcaagcaagaggtccctgtgggccaggcagagcagcagagtgtcgtctcgcagttttatgtgagttcccagggacagccaccgcctgctgttgttgctcagccccaggctttactgaccacgcagactgctcagctgctgctcccagtgtccatccagggctcgag

SEQ ID NO: 887 - DNA, 321 bp, Homo sapiens
gaaaccttatactcattagcagccagtctcatcccccaccccaactccctaccctgcccagcctaggaaaccattaatatgttttctttctctacagattttgcctattctggacatttaaaaataaatgaaatcataaaatgttatcttttgtggatggcttctttcacttacgtaatgtttgggaggttcatccatgtagcaaatatcagcacctcattcctttttattgctgaataataccccattgcatggataatgccacagtttgttcattcattcatcagttgatggatattttgggttgttttcacttttggg

SEQ ID NO: 888 - DNA, 2686 bp, Homo sapiens
aagaacttgcagaacagcttagcaaaggaaactttggagcccctctctcaggcagcctggttgcttcaggtcaagaagaccacagacagtgatgccaaggagatctacgaacgctgcacctcactgtctgctgtgcaggtgaccaggcttgcttagtgtctccctggctcttccctgacacatcagtgcagtgggcattgcctttcttggtttagccagctgtgggcaccctgattctgtgtgtactctcgggagcatacctatcacccatggcccacccttttatctaataaatatttattaaatactaacactaggtcttaaaaacatagaaatgggctgggcgaggtggctcacagctgtaatccagcactttgagaggccaaggtgggaggattgcctgagcccaggagtttgagactagtctgggcaacataacaagacgctctaccaaaaaaaaaaaaaaaaaaaaaaaaaaaaaaaagctgggtgtgatggcacacacctttggtcccagctacttgggaggctgaggcgggaggatcgcatgagtccaggggttcgaggctgcagtgagccatgatcatgccactgcaccccagcctgggcaataaagggagaccctatctcaaaaataataataataataatcacacacacacatatacacaaatgtctatgatgcattcattccctgcccattaaactcacaaatgtgtatgtggaggggtggccatgtgggaggtggggaggctagaagggggctcctcttactgttttctgattatctgatttgcctttgctccctaaggcacttttctccccttgttttcttttcttggaaataggtaacatacagttcctgaaccaaattataggctaaaagaaccacctgtgcttcccaatggttcccaataaccagaaccattattttatgaacagagttattattttgcatggtctaacaccatgttatgtaccgtttgcagatcataaagatccttaattcatacacacctatagatgactttgagaagagagtgactccatcctttgttcgcaaagtacaggtgagattcttaaggatgtgccttttaattttacttcctaactatggtataagatgttgatacttaattaacattatagaaatccaggattaaagtacatttacccacatatacaaatgaaaggcacccagctcaaaggtaagcaggaaattttcctgtgaaattttcagaatccactttagtccaggtgggaggggaatgaaagcaccaaaatcatgtctcccgtgctgtattctgtcaatatatcttatttcttactgatcgttgaatactgtgcaagtgggcagaggctgaatggaaacagagaccatttttcttttataatcatttgtataaccattttttcttatataatccctaaagtttgtcccctaaggaactctagggcagcagttctccaagtttggctcaaggatccctgggagtccttgagacactttcaagagggtctgcaaaactcttcctttttctaaatatgtacctgtggattttctaagtaggtatctgtggattttctcaatagttatctgtggattttcttcgtgtacttcaaccaaaataacatatcacaacagattgaatgcagaagcagatatatatgatatatcgtatatatgataatatagcatatatattaaaatatggcgtatataatatatggttatatatgataatatattaagtcagacatgaaagagatttgcaaaaatagaaaataccacttctcactaaattttctttgttttggaaacttatgtttaacatgtgtagagcttattttaatgaattaataaatcattttaattactaatatggcaaataccgatatacacatatacacaatgtatatttaattactaatatggcaaatgccaatatacccatatacacaaaagcttttggggcctcagtcatgttttagtataaagcggtcctgagaccaaaaaggttgcaaacccatgaatgaagaagaaagatgggttcaataaaaatgtaatacttgaaatctactcatgtttgaccttagaattatgccatgagaatagattagaatagaaaacagatttatggtcaactcatcccatgggaaattaacttctgaagtgaaacaggacaagttaattgttctgagagctgatctggaagccctggatagactttggaattgtgctgttgttaaaaagttctcatgtatgtcatttcatgtgatggtgcaaggagctctccactagagatagctgtgttttgccttgactttcaggtagcagtaaagcagaacatgttagtttccttactcatttttcctctgattctaatttcaggctctcctaaatagccgggaggattcatcacagctgatgttggataccaaatatctctttcaagtcacatttccttttaccccctctccacatgctctggaaatgattcagatccccagcagtttcaagctaggctttctgaataggttatagcaggagaaaaagtcaatgcactttttcttcaaaagctaagtgaaggttcaatatgagggatgtgttttattaattggcagtggaaattggaatgtgatttaaggaagaaaacagacttttctcaaatggaccacatcatct

SEQ ID NO: 889 - DNA, 149 bp, Homo sapiens
ataaaaactaaaagtagggccgggcgtggtggctcacgcctgtaaatcccagcactttgggaggccgaggtgggcggatcacgaggtcaggagatcgagaccatcctggctaacacagtgaaaccctgtctctactaaaaatacaaaaa

SEQ ID NO: 890 - DNA, 13660 bp, Homo sapiens
aaaacccttagcccataagtagccaggcctttccggctactttcagccagaggtgtttgctcatgaccttttctctcgccacaccctggggctcttgggaggagctgagatctgcgctgcagtgccaggatgctgactctgttggtgctggcttctgctgccttcctgggtcccgtcacatccttcttgctcaaccactgggtgcacaggatggaaacttctattccctctctggaagacagcgcgtggcttggcttcacagagttgtggctggagaccgaagcagcccctttctcaggcttactgtcaccagtctgtctgtgttaggggagaggggagtccgctctgtcctgaaggcccagagatggaaggacaagtgtaggccgggtgttcaggctcttccaacgccgactgcttcaactccgagcaggtcaggactggactgcctacttccttgtttttagggtgaccctcttaggcgggactgtttcttccttgaaatgctccttcctcctcttcctttatatctcggcctccacatggttccccatgtgactgggtcaggaggcttcctctgctggtttttaagagctggtcatgccctctgtggggctagtgtggtcacagtcacatgccctttgagcctgttcttattcacttagtatgaactaaactctcaggccgtattgttccaggactgccagaagcacccgacaggttaggcagtctcggtggtaccctggggccttggcctccatgtggcctctccagcacatttccgtggcttctgtgtcagtggtttctttcctctgcttggctccccatggtttcaagtctaccagggcaggtgtggaaactgcccatttggccctgatcctgagtgactggtggttctggccagtatccaggtatctcagcattggcaaggcggccttgaggtgtggaggtcacccggattctcacagactccactccaggaatggatcaatgagattatactaaatgggctctggcttgatttcaggaccaccccaggacaattcaggggaagctttaaaggaaccagaaagggcccaggagcactctttgcccaactttgctggggggcagcacttctttgaataccttcttgtggtttctctcaaaaagaagcgttcagaggatgattacgagcctataatcacctaccaatttcccaaggtaaggactgaaggaggggcagggccagccagaggactggggtgtttggaaggtggtaggggtgggggttccacctccttctccctaccctaccggggcttgagcctggagctgccctgagctctgagctcactgctctccatttccttcttagcacagccccagttctctgttatcacccacagaatctaggtctaacttctttgtgagggactgacctaggcttcctagcagggaaactaggctagacattttgccttttaggggacctgataggtcttccaaatcccattttcagtcacccttctctgcagagaagcttaccttctgccagaactcctagaatgaatcccctctctgggatgtgtgggaaggaaagagtggggcagccttgtaactggtgggcaggcacagccctctgcccgagcccaagcattagactccttgtctgatccttcaccaggtagagggttgggaagccttctcattagcaggtgtgccaactgagctggccgcttctcttctctgatgtggtacctctctgatgttgtcctcccaggggcctgggccatttcagggcctttctatattcaacatggccctgtcccctttctatgtagatctcgatactgaggtcgaactcaagcttatgtagagttgacccaggaggggctgtttcagctttggagttgttccaactggacccagaatgcaaactgtgcagagtcatgggcaaaggcacccttcgcccctatgctagtggagaagcttaaccctagactgctttagagcctcaaaggaagcccaccagctctgaagctgtctcctgctatctctgcccccagcttcacatccacttgtcttttcctttgccttatagcgggagaacctgcttcggggtcagcaggaggaggaggagcggctgctcaaagctatccccttgttctgcttcccagatgggaatgagtgggcatcactcaccgagtatcccaggtaattgctcagccctgggcaagggtattggatttggggagaaggaacatgtgtgagttctgtggctcctgtagcctccctcactgctgtcatttgttgattttcggcctgggagtgtaattgatttgtttgaaaacatctggcctggggtccctcaaggccaagaatatgagctatcagtttgatcagtcacttctgtccaaagagccagattctcccacctgtcctagaagcaatagttgctgcttttaactctgctactggcccaagctggacttagcagaaagcagttagcctccaagaaggcgatgtagcaaagtgccttctagcatgagccctggaatttgactgcttgagctttgactgtcacttatttatgagttgagtgaccttgaataagaagcaccctcctggcctcagttccttcatctttaaagtgggaataattactgaacctacctcaaagagttgttttgacaattagatgagatgatgtgtttagggcctgacaccagtgagcccttactcctgtgattaatcagcaactcccctttgccctcctctccaccctctagtgctgaccactttcctgttttaggattcagtgagcaatacaaatcaagccttgtctgctctttcttagggagaccttctccttcgttctgaccaatgtggatgggagcagaaagattggatactgcaggcgcctcttggtctgtgcagctcagaactgccccttcctttctgcagtctgctcagctccacggctgggcttgctcaagcctgagctgcaaaactccgggcttattggcagcactggttgtagaaaaagcacagcccaggacctgctgccatgctagtgctccctctgcagccccacaagcacgaggacctgatgccccttctccccctgctggtcaggctctggtctgtgctctctctggctttcaatacaactaactcctctccctgcctgctctatccaggcctgcttaccttggcccctggagcctcccagagcagaggctgggacttggacaattagtttcaaatcttaggtctcaggaggattccccaagtcacctttacagtgctttcctccttagccatttcttcatctctaaggcacacttgctacccctctttgctgaccccagattgtgctggcactgcaggtggcagcgcttgcccaccaactcacccagtaccctcaaggatttcttcttttgatgctggtggccattctgacctccctgctgcacccaccattccccataaatccccctccccagccctcagccttgtgctccttcatacccagttgggagaagcccttggggaggctgcagcactgaaggagcctctctgtccctccccagcctgccggccctggccctcgccttcccaaagtgtactgcatcatcagctgcatcggctgcttcggcttgttctccaaggtagggataggattcctcagggcctgcccatattccaggctgtctctggctgccaaccctgcctgtgcaactaagctcttagtggagctcttctcccatagccagagtcagcattaaagcacacttgggaaaactgaggcaaaggggcatgcacttgacttaagggaaaagtggaaattgaatctaggggactggacctcttgcagagacagctactgttcccactctagccaagtaagaaagtagttgaagtaggacaagcagaagaaacttctgccctgagtttcaatttcctcatccgtcgaatggatataataatctcaccttcctatctcactgggtggcgtgaggcttaaatgaggtgatatatgagaagactctttataaaaggcagagcactaaacaaatatgaaggagttataagacccattctgactccttcaagggtagaagaacagttgaggtccccaggacttctcttggagctaatttgagtgccagtgcatctgagacagaatttgagcagaatccatgggggccatgccatccactggtgaccagaaaggacttcattatgctctgaccccagcaggacctttggaggaggaggggaggaaactctgtcagcttttgcttgggcagagcattcctttgtgcagtgctcctagggatggaggcagtctctgacctcgggaatctacagtgggagttggaggacagagtggtaccaagaggcttagccttctagcctcctgctccaaccagcatgagtggacatggtaccatcatgggtgatgagtttactccgggatgacttcccagggaggtgcttttatgttggtgttaggagaggggaagaatatggatgtgtagagagataataaaaggaagctggaagaaggcaggtcttatgtgggagataaactgcagattatttagcatgagcccagcctctgccagggagggagaggaccagttcgtggagggccctagaagatacatgaggatcagctgaaccagtatgagaacattatgacgctcaggggcaagtagagtctcttccacctgcctggtagtgtccctttgagccgtgcctcccgtggttcttttccctgcagatcctggatgaagtggagaagagacatcagatctccatggctgtcatctacccgttcatgcagggcctccgagaggcagccttccctgctcctgggaagactgtcactctcaagagcttcatccccgactcaggcactgaggtgggttagcaaaatgggtgagaccttccctagctggagagggtaggcatctgtggcacctctcaccactgttcttccattaaccaggttaaagtacagagaaactgagccagatggggactgggacttggttagaatggacaaagctgaaatcaaacccagattttctgatccttctaacttgatacccacaagcacctagttactgctcaagccaccaagacttttatttataataaataaaccatgtaagttgaggcttctggtgctataaaggacttttccctcagccctcagactgccacttgccgctaccccccttccactctcctttgtttgtcctgtctctaccttacagcgtccatctgtccatttcttatcatccatccccacctccgagtctccacccatgcacaggggactgctatcattttaaggcaccaagcacactgaggcagcaggtagaacactgttctaagaattccagtcctgtcctctggaactctgaatagtctgtgtgcccctttgaaccttggcttgcttccccacaggaaaataaggggagaggctagaaattttcactttctcaaaaaataagtgcttaatgcttgctgtgtgccaagctgtactattttctgggaatacagtggtgaccaaaatgaatgtggtccctgaccttttggagctgtaagtccagtggggagaacagatgttaaataaacacaccagtgcatgttgaattagaaattatgtaactgtgatgaaagaaaaaaaaacaaaacagggtgctacataagaagatgggaaagtatcacatggccaaaggggggcctctgtgacctgaaagagggtaagaatgaagggagcagagcagtgcaggaggagggccctcactgtgaaggctgcaggcaggaaagatgggattgctcaaggaacagaagcccatgtggtgaagcacagtgagagaggggcgtgtgctcggggaggcgagtgagggagggtgcaggacattatgggccatactcaagatcacatcagtgctgtcctccagccaattagcagggggacagagagacagggccagattcactcctgggggcagaaggaatagaggctggtagaggcctagcacctcggggtctgcatgatcttgcagtatagtgacaccttctctctctctggtttccccacagttcatttcactgacacggcccctggactcccacctagaacatgtggattttagttctctattgcactgtctcagttttgaacagatacttcagatctttgcctctgccgtgctggagagaaaaatcatcttcctggcggaaggtctcaggtgggcccagcccctgaacggctcacctgaactgcccagcatccctgggttcaagggaacagactggaggttatccaaggaaaatgggctgtagggtccatgcgcccaccctcctgtttctagctccttgttctttaaaccaagagaaacagctgttttgaaccacccccactgcctcttcctccacacaggactgctgcctgggcctgaggaatgctcctgacttagcttggggaaggacaggaagtattcctgggacagcctgggtgggaccagttagggtggatgcagacatgattctgcccttgcaaggctgagggagggtggagaacagggcaggaggtagatactcattcaacaaacatttattgtgtgtcaactggttgccagatgccaagcattgggaagatacaaacaggacaaggtccttcacctgaaggggatgcggaattacatactggttgaaagcacagggattgaaatcagcagaattaggaggtttaaatccagttcttctacctttagctgtgaggttcccattaagttagtttgttaacttcttgaaaatggaaataatgattgtgattacctcataaggttgtggtgaggattaaatgaaataatgcacattaggtacctaacaccctgctgagcacatattgctgagtgctagcttctgttcttaagttcacagttgagtatatccctgtgtatagtggaagcagggtactattgtgccatggtctctaccttttaggggcttcagatctgagaaggacgtggggagatgtaatagaatggagaatgaaaaaagtcataaaacagtaggggtaggggtagaccttctattcatatctggggagggagaaaaccagtgattttaggttgacaaccctgcttttatcttttagggaagaagaaaaggatgttagggactcaacagaagtcagaggggcaggtgaatgccatgggtttcagaggaaaggaaacttgggcaagcagtggggtctctgtgttgaagattctgtaaaaatgggtgataaccaaagaggaactagttgtaggtaatccttgaagggagtggcatcatcttttgctttggaaatagctctttcactcccagccttgaatggaaaccagaaattcctgtgtggctagagctgggattctgcctttcctcctcagatcagtgtttgggaagtggaggtcggcaggattcacctctcagacgtttactttcttcagggaaatcccaccactccccacttccttcccacactgagtttttcagctccctgaagctcggacagggaggggacttccagtcagctagcctctcagagactcaattttgctaattcaggaagtgccagcttgaaacccagaactgaaacaaggattcccgcatctgtgcttttattggccttgactttgaggcaatttggctggagtaaagaagagccatgaaagccaggggataaaagagaaagacagagagtgggactgtgtgtatgtggtggcgagaggagtagggtccaagttgtgacttgggcaggagtgacgagaaatgcttcactggaaagtcttgaggaggcacctttgtgggactttccgtgtaggaattgctgggcagaggttcctagaacctgggaatttcccaagctactcaggcagcaacctggtaatctttaataacctcgagtgtgcccagagggggctgtgtgggggcaaaggctggggatgagggtggatagacatagcgaggtaaaaaggctttgcctctcggctgagcctccagtgcttgtttacatgtttgtctcttaactacactgtgaattccttaaaagcagggtcagtgtcttactcttcctggtatccacatctgtgaggtatgctcacagttgtgagcacaggctaggggctcaatcaattatctccttgaatgaaagcaactcttcttccctcttctcttcagagtcacttttatttttggccagtagtaagttgagaagactaactgggaaaagaagggtcaaatcaaggcccttcttgatagtgaagcctcagactctctagtttctgtccctccctcccagcaatgtacgttcaagctctgtgaccagcatggcccccagacttgcctttctgcccatgggcatgggcagcactgctctagctgctgttggtggtgggcgatgaggggtgtgtagcatggtggtgcaggggccccctgactctcatcctctgtgctctgtcccagcaccttgtctcagtgcatccatgctgctgccgcactgctctaccccttcagctgggcgcacacctacatccctgttgtccctgagagccttctggccaccgtctgctgccccacccccttcatggttggagtacaaatgcgcttccagcaggaggtcatggacagccctatggaagaggtatgatgtggcaagaagagtgcatgatttggagccaggtagagtgggattcagatcccagctctgctgcttacagctgtgtgattaggggcaagttaccttacctctttaagcctgagctttctcatctctaaaatggggataacagtgttcacttcctaaggattctgggggaaaccacctgcctagagctcctaacctggcacccgacacacaggtgatgctcaataaatgcaggttcccttctgaaggattcccctttaggcataaggggcagtggatagcttattcaggggtgagcagactgttctgtgccagctggccctaatgagcagtcttcggggtgtcccatctcatccaaatgtatgacacagctggtctatacaacacacaccccactggaatgtatttgaattccttggaattgagctaacatggccctctggcaaactatgagtcttaaaaatgcagatttttgcagcaagtcatctttctgagtagctcagagctaaggtggctaatgaggatataggtctgaatcctctttgattttgttagcttcttacatcttggcagtgcaccagacacaccagagaactcagttgtgaaaatgggcattaaaagcgtaaatctatgcccactgttggaaaaataactcaaaacatgtgctttagagttgtcagtatagggactttcaaaagatagtatgttactgtatctcaagccagaagagggacttgggaatgtctgccctggccataaccattgactcactccaagagataactgagctccagagacttatccaaggccacatagacaacagtggaacctagcacagataaaaccaaatcctctcctatagaaaccattgctgcaaagtaaagaagaaggctgtgtttcccttctttgctccaccggccccctcatccttccttaggactgctgagtacacatgccctttgaaccagctttagccttgtgactaactgggacagagtattagccccatgtttagcaataaacatttaaatgttccaaccccagaaattatgaaacttcttgactctgcagctccagctccctggaagccgtggctcctctcctgatggccagtcagactctggcttttggtaagggattactccacagacaataatatgcccaaatactggaaagatttctgggaacaatcttgaaaaacaaattatttatacacactctctccccccaatccctcaaaggaacagtcttcccttcatgaaggcatctgagcctatgtatacaagtggtttcaggcctggactagttcaacttttctcccctgatgacagataattacagtgcatgctctattttttggcatactttccactctctccttgtatttggaagaagggacaatggagggatcattctctctatcaagaccaagggtcacaaatggaaaagagaggcccagcgggcatttaaatgaccaatacatgatttgggaagttacggtaaactggtgggaacatgccctgcctaaagcaggcaactgctactcagttccatctgagtgttgtcctttagaaatgtggacccagtgttagatctcctgacttttcaggagaagccccaaatccaaactttatgtgagatagtccagtttaaatattggaaaccaaatcaattacttaaaaatactgtgaagatcaaagaaacagatctgctggttggaatcagccagcaggatgcctatttgtaatctctggtctagactgaaggctccctgggcagtgatggggccagtgctaaaactcaggtcccccaagttccagcccagtgcttatctcacttgaggactgtagacacatggtctcctcacttcctttcctttcctcttcctgttgaccctgggctcattttcttcctttgctgtttcctgctggaaggcccaaagctgtgaggtagtttttttttttttttttttttgagacagagtctcgctgtgtcgcccaggctggagtgcagtggcgcgatctcggctcaccgcaagctccgcctcccgggttcacgccattctcctgcctcagcctctggagtagctgggactacaggcgcccgccaccacacccggctgattttttgcgtttttagtagagacagggtttcaccgtgttagccaggatggtctcgatctcctgacctcgtgatccacccgcctcggcctcccaaagtgctgggattacaggcgtgagccaccacgagaggcaggagtttttctaatagaaaattgtacataagatgttgcaagcatgaaaaaaataaaaagatgttggtctctgttctagagagcagggagttgaaggggaattgtagagagaggaatgcaatctcaagaatatcagtctaggcttggaaaaaaattggttctcttattagcagcatagtatgacctcgggcagcttctttggttctgtttcctcatcttcaaaatggagattgtatctgcctcacgggactgttgcttgagatcaaacgtgtaaagcacttatgtgaacaatgtactaaatgctccatgtagaagcaatttctgcagtcaatgttttattaagggagtgactggctgtgatttctccatcttgtatttcccttctaccttagctctttctcctactcccttcctacaaacacccacaccctttcctcaggaatggaactgagatctccagaggggaatggtgagaaaggagaatgctagataggaaatgagaactgaagatattgattttgttgctacctgggctgaaagatacagccacaggcagaaatcaagacggtaaatcctctgggggtctatgaagaaagaggaccagagaaagccagtctatgtttatttcaggtcctgctggtcaatctttgtgaaggaaccttcttaatgtcggtaagtgtctgggttcagatcccctgcaggcctatcaacaactctaccactctagtttcatccatgttccacttatttaaacaaacatttaagttctttgttgagtgagaatctgtgctaaaaagaccacatctctctcaaggagcccatggacataaacacagatgacttcactataagacaatcagtgatagtgccttttaagcaagggatataaatcaagtaccaccgggatggagaggatcccttgctaatgtctagagtcaaactaaaggccaagaaacagcttctgttgtttctgtcctatgtggctatttgcgggtggagtgggggtgtagaattcatgccctccttatgcttttctgccaaccaccttcactccacacttccttcctgcttgacctcggagctctgtcctcttctaggttggtgatgaaaaagacatcctgccaccgaagcttcaggatgacatcttagactctcttggtcaggggatcaatgagttaaagagtaagtccttactcttattttgggtctctccaggcagtgcaagggcatgcttctcaatcattcccttccagaactaaaatgaactcattcagtagtcctagaccagccctagaggcctagaacctagggcaagtctgaatttgggattgtattcttcctaagcaatggcagagaactcatacccagattcccatctcagtcagtaattatgaaccctaccctatggctttccccaggagctttccgcctgcaagaaagccattcttgaaggtgagtttgggtaatttcatccttctgctaccctctgagatggcctttatatctcctgcagctgcagaacaaatcaacgagcatgtttcaggcccctttgtgcagttctttgtcaagattgtgggccattatgcttcctatatcaagcgggaagcaaatgggcaaggccacttccaagaaagatccttctgtaaggctctgacctccaagaccaaccgccgatttgtgaagaagtttgtgaagacacagctcttctcacttttcatccaggaagccgagaagagcaagaatcctcctgcaggtacagtaacagtccccatcagtctaagcccatagagggttacctctagaataaagaggaggggaaagaaagaatacttctctttagaaacccacaaaatagctgtaggtagacttttattagtggagttgaaatgacataacctgaaacctaagaaaatgtctaatgggctgccattttgtggaagttggtttacccattagtgaacaggactgagccctttcctctgttttagtctagagctaattcctgctaagtatcctctgtttatgggctcctttttggacaaaactgaatgtctggatctccagaacctgtgaggccagagacatcctggcagggatggcagtatggggagcagacaggatatttctgatccttattcctgagctcattataatctgcctgaccagatcagatgcctctaacacctgtatttgaacccacaggctatttccaacagaaaatacttgaatatgaggaacagaagaaacagaagaaaccaagggaaaaaactgtgaaataagagctgtggtgaataagaatgactagagctacacaccatttctggacttcagcccctgccagtgtggcaggatcagcaaaactgtcagctcccaaaatccatatcctcactctgagtcttggtatccaggtattgcttcaaactggtgtctgagatttggatccctggtattgatttctcaggactttggagggctctgacaccatgctcacagaactgggctcagagctccattttttgcagaggtgacacaggtaggaaacagtagtacatgtgttgtagacacttggttagaagctgctgcaactgccctctcccatcattataacatcttcaacacagaacacactttgtggtcgaaaggctcagcctctctacatgaagtctgtggacatgtaaggacgagagtaaagaggaaaatcttatttttatatg

SEQ ID NO: 891 - DNA, 3707 bp, Homo sapiens
tggcttttactatgggtaaaagtattttcctcgtggaaaataaggcaatgaatatgacaatcaagtggactacaagtggaagacctggccatggggatatgtttggagtgatagaatcatggggggcagcagctctacttcttctaaccggaagggtaagagatactggtaaaagcagcagcagcactggacacagggcatctaagtccttggtttggagtcaggtgtgctttccagaatcctgggaggagaggctgctcactgaagggaagcagcttcagtctagagtaatttgaggataggaatttcagtcaacagcagcctgtgaagaacactacatggcttccatacgtaggtctgtttccccatcactttcagtttgcactagtcctttaccttcagtcttggacatcctacctccaactgatctttattttgagcagcacagtccaattctttagctaaaggtgaagggatcgctgcactgacgttcttcccctttgagaaaagaatcgtaattttaagagtctgaaggagtttagtggtcacctagtctctcctcccttgatacctctactgatactttctactcaagcattgggaagcttttttagaagaatcttatcttcaaaaattctaccttttttaatgtgtgtatttgtggccctcagaagttcctaaattctatacaaagaacacaaaagtttctggagggtggaaccgggcatactgaagttcaagccaatgtaatttgcttttgggagtgcagagacctactgcaggtggcagatgtcccactgtccacacaccgtgcttagctacactactattcttcacagcttctaggaattacattttttttttggtagtttatggcagtggtgcctaaatatagttgtacctccaaaggtttcagaacaggaactggaatcctgagaatcttgtgaaaatatcctcttatgcctcatcacaaatacaccaaatcatctctagtgataggacctggaaatctgtactttcttaaaaggttcttcaggtaaggtttgctgaggtttattacaaatgtacccttgatttgatgctaatgctgtatttagggctgaaggaagcacacactaaatatctgagtgcttttcagattccatctatgctgaaaaagaatctaggagaataaacacatttcaattagcccttaacatcttgcttcagaactttagcccactaaagcccagtagggcataggagagaacactgcaccaggattcagatctggattctaatttttgttctgaaaaatagcaagtgacactggcatgccatttaacctctccgggcctcaatttccactatagatagtacctgatgtgtcagtaagacaactgatgtaactttgccaaacaagtagaattatccttcctcctttgtcctgctctgtcctagcttttaatacttggtctgccctaacattttcctgtatgtatttctttatcccagatattcggacaattgctagcaaggaaaagtaatgacggattttcatttcccaatatagtctggcaaagaaatgaaaggtttacttctccttgctaattcaatctacatggtattgatggaatcattaaaagtgcaagcaagcagcgctctggctgccatacaaggcagtgtagctactgtttattcctgattatgggacaagatatagatgaaaatcaataataagacacctcattttagccaatagtttaaatcttttctcctgtgtccctcttcttcaagcaactgaattatctgtataaaatggaaacatatctggttcccatttcaaacgatagtacagataccaaagaggagactgccagaaaaggagagtacaaagtgacctcttagagaggcccaggcacttgctgaaaatttaggggaagggtatgagatttctaaatgattgataatcacacaggtgacaactacaacacaaaaaaaccattgacaggaaaaatgaacatagttctcctttttaaagtttctacaaaatagaaatgtcacaagacacatcacaacaatgcagtggaccacattttcttatttattaaagaacagaaataaattttgcttaaatttaaaaaaataaccattaaaacttagtttatctttccactgagtaaaactgagaaaaagttggcttttagatcatatatttatttaaaaaaataaaatgggaaattgacaaagttaccacattattctgcatgctaacaggatttcccaagcctgtgagagaatcatttcttgagcaattaaaaaaaaaaaaaaaaaaaaaaggacttcctcaacaatgtaaagataggaaacttttcaatccaaattcaaggtctttattactagttccacctcacaagctagtgggatgtatctgtgtcacaagctgaattcctcagtaaagaaagcttgagaagacactaaacaaggatgttactaaaagacaatgatttgttaaaattataaagcaatcatcttttggcctgcaaacagtcaacattagaactctccaccactgcggatctggctccccatcacagtattattctgaatccaggataattacaatcacatggcatttttttctgcatgctttcttggcccaaaccctgcatgacaacatatacaatttacaagatgggacttgaaattcccattctcacacaggatagttagggcgtgttaccaataataaagaataaaagttatacaacattgattattataaattatatttgttcttatccacccccattctccttaatatgttactttctttcctgcagaaaacatgatgttcctataaaccaattacatcattaatgatgattagaatgagctgtagagacctggattctgaagacatgtatgtccagttgagacccaatctgatggcaaacccctgacccagtagcggatcaaatcaaagaaagagaaaacctggaaagaaaagagacattctcagcacccgtttaggctctccctaagcttcctgaaagtaaagaggactggactctgttctctctacagattcaccttccattccataaaataattcaatttccttgcaatctttccttcacatacaaactctttgttagagagacagatggcaaatattttaagctttatgggccttattgtctttgtcacagttgcttaactctgccattgtaccatgaaaccagccacagacaatatataaatgagtggccatagctgtgttccaataaaactgtatttaccaaaacaggctatgggcccacagggtgtagtatgctgattcatgcttttctactcagtcagaaatttgcaatttatgagccctgcccgatgtaggcaggactagtaagattaatgcaaaaaataaaaggctcaaatataaagccatagaactctcacacagccccatttatgtggatttctgacattccaaatcattacaattatatgaacgatctttcatgactgggtcatcaaaataagaaaacaagcaaccttcaaaccctcaaaccatgaaataagacttagtacaatacctaccagggcaatccaaagtacaatatattcatcaataaagctgttaaaatactggtccagaaacaaaagtgccggacctatgaatgctgtgtcatgcaaatgcatttcacttttcgtcatgtgtgcaacct

SEQ ID NO: 892 - DNA, 359 bp, Homo sapiens
ctgtgcagcttgcaagtaaggtgtggtgccagctccaagtgttctagttcgctcttctcacccattacagcatttgaacatctttctttactgtacatgagtttggccgtgagtcctggctttttctagtcccacagaagccaggtctagagctcttaggagcaaagcagctgttttccctatcctagcaccccactctcttccagaggggtgcttattcttagcaggagtggcaaacactggcgtcaaacccttttgccccctgctttccctttgaggcagcttcctggtaaaagccttccctgtatttactcattcaggggtttctgtgagaatccaaggtgatttttttgctattc

SEQ ID NO: 893 - DNA, 2148 bp, Homo sapiens
gctgaagcgcaaagacaagccaaagtgcgggtgagcactccatcctcccacccagactgccctttaggaaggcctgctcgtggagaacatttcccctttgcttccttactgtccattcattaggcactgggcagaagctgtcttgggcccttacaactctattaaaattgctctcttaaagtgtgttaatagtcccctgactaatgcaactcctctccctctctgaagctactgataatagtgaccactcactgcttgagtctcaccttccctctctctccttaaaggcatctcctccacacacatcaatccctcttctctagtgctggcatcttttcctgggtaatcgtagtcaccctaacttctaacttctaggtatcccctagaactgtatcccaagcttggcacaagttttagagggacaaccacgatcagggcccagttccctcaatgctagagccaagagaaggctgtgctactcggctccactcaggcatgacagcaagaggcaaagatgtggcagctagcagcttctggtaactgaggtgtgggtgagggggccttgggaagaggaaagtgaagaatgaagggaggcagatttctctgaaagaacagagagcaggtgaagataaaaacctgaaccagtaagaggatcattgcctgtggatcactgaggggaggcggggatgaggaaggggaggaggatagtccccagggcagttgcttctagatctctgagtgaagtcctcttcacccactttcaggtagcatttgtgtagtgagctcagcactttcacttcagaaatgtttacccattcactttccctgagttgggggtcaccctttcataacgtcatgcctttgcatggaatgctggctaatcttttctctatgttggcaaaatcctaatctttcaaggcccaccagatgctaataactcccctaatacttcatttatacttgtgatggctcctaacgcattccaccttaaattgtgattaacagtttaatctgtctccccagctcaagacccttcagaaagaagaataaacatgttctatgcttaaccgtgcttgccacatagtagatgctcagtgcttgtctgctgagtcatactgcatagtggtgaagccttcagggaatgaagaacaatcactttgctttcgtcacatgttttctagatgattgctgcagaagcggaaaatgctgcttctgagtccctgaggatggcagctgagattctgtcaggcacccctgctgccgttcagcttcgatacctccacacccttcagtctctgtccacagagaagccctccactgtggttttacctttgccatttgacctactgaattgcctgtcttctcccacaacagaactcagggaagcctccccttcccaagtccttccaaacctgttgagccactaaatcctaaaaagaaagactctcccatgttataggaaggatggggcataatgtgactgtaaaggggcctgccatagaaaagtcacatgcctgagggagacactctgtcctcattccctgcccttcctttggttgccatatggaatggccatggaatgcacgaagtcacaatgcaccatccatgagaagacggtgaaatgatgtaatgacagagaaggcagacaacatgtttccgtgactcatctagtcagagcaattatgggaaacagctttggtcaacattctactttggaaagaattttgagtctagatgtggttaaattttgacttctgggaacttggttcagatgtccctttcactgtatgtcctctgacccctttggcaaggttgccacagctcccacagcccttcctacaagcacctatcattgggcttgtcacactctattgctcttctgtcccaaagatgcagtcttctctccaatgatactaccaagtcttagttttcctcaaccacactcaatctttttgctccaccctgaattcctcacacctaaccctgatagttacctaaagtgacacttaaatgtttcagagtgaatgcaaaaaagagagatgtacttggagtcggatatacaatttatccctaattaaagcatttaaaaggaattctttttgtggagattccttttttaaataaagaaataaataaaaggacaaaaac

SEQ ID NO: 894 - DNA, 125 bp, Homo sapiens
acctcgcccggctaatttttgtatttttggtagagatggggtttcaccatgttggccaggctggtctcgaactcctgacctcaggtgatctgcctgcctcggcctcccaaagtgctgggattacc

SEQ ID NO: 895 - DNA, 101 bp, Homo sapiens
ggtttcaccatgttggccaggctggtctcgaactcctgacctcaagtgatccgcctgcctcagcctcctgaagtgctgggattacaggtgtgagccattgt

SEQ ID NO: 896 - DNA, 133 bp, Homo sapiens
gcccgcctaatttttgtatttttagtagagacggggtttcatcatgttggccaggctggtctcgaactcctgacctcaagtgatctgccggcctcggcctcccaaagtgctgggattacaggcgtgagccacc

SEQ ID NO: 897 - DNA, 104 bp, Homo sapiens
agatggggtttcaccatgttggccaggctggtctcgaactcctgacctcaagggatccgcccgcctcagcctcccaaagtgctgggattacaggtgtgagccac

SEQ ID NO: 898 - DNA, 360 bp, Homo sapiens
acagggtttcaccatgttggccaggctggtctcgaactcctgacctcaaatgatctgcctgcctcggcctcccaaactgctgggattacaggtgtgagccaccgcacctggcctaattgtgtaatttaaaaacctgatttagtatgcatgttgtttgacagaataatagcagcaagctatttgtccctttcattcaaatttaccagactttataactaatgtgagtgagcatagttttgaagtattacatttctggtctttaaagagtaaataactcggccaggcagggtggctcacacctgttaatccccaggcactttggagaggccaagggtgggcggatcatgaggtcaggagttt

SEQ ID NO: 899 - DNA, 1002 bp, Homo sapiens
tacaatgtttttaaaacaagcaaattttattaaaggaaaattttgcaggtttaaggtttgcaggtgaaattttgtaggtgaaaaggtttacttttcaccagtctgttctggcatgcttctaatgatgtcagagtcacctaaaaaataaaaataaaaaaacagtaattttacaattcatttaatagcaactggtaccataaaatttctctacctttggttatcccttctgtagacaatggtctgcaaattagcactgactttttgcaaaagttatcacattagctgtactgtcatttttcttaaggttgaccaaagataacctagaatcacagccattatataatcacataaaatgatcatataataaaattggtttatcaccagcatttataaaaccagacctagggaaagaactaggtttggggacacatgcatggtcttaatatagcgaatgtttagcctgtcctgactattacaaaatcagaacagcgagaatattcgcagtattctatgaatcaaagattcacaattggaaaacagaatgatgtagattttttggcacttttttttttctcaagctaattttacatgtctgttctcaagaagcaagaattactttcttctgttttgccagattattctctccttataatttcaccttttaccaaatctatgtcattatttcataggtacttcatcaaatgaaattcattatctgacagtaaaaattttaacttataataaagccaattataatgtattggcattcattaccaattctctacaaaatacaactacacgatatgccttgctagatccatattctatctgaatttaggaaccaaagacatttgcgtagtaagaaatacttgtccagacattacattagaaaggcaaaaaaaaaaaaagactttatgatttaaaaagcatacctggatcaatgatagccagtgtgcacactctgtagtattttccgcatgctgtgcccagttcaatattatt

SEQ ID NO: 900 - DNA, 2033 bp, Homo sapiens
cttgaacctgggaggcagaggttgcagtgagctgagattgtgccactgcactccacactgggcaacagagcaagactctgtctcgaaaagaaaaaaaaaatgaaattgcttttaacattctattacatgtcaccttcccatgtatataactctgtattgtctaataggtctaagagtgtaaccagttccagtagcagtagcagtgacagttctgccagtgattcttcatcagagagtgaagaaacatctacctcttcctcctcagaggacagtgacactgatgaaagctcctctagttcctcatcctcagcctcctccacaacctcttcctcctcctctgattcagactcagattccagctcttccagtagcagtagcaccagcacagatagcagctctgacgatgaaccaccaaagaagaagaaaaagaaatagagttgctccattcatattggactgatggactgaaaacattgatgtgattcttgaaagggaatttagaatatgttaaggccaagtaggttaactggtgaacatttctagaattcaaaagtttctaaatgttttacattgtaagagcatagagaatattaataatggcttatagagagagacttttatttgaagggtgaatcttgttttttttatctttaaaatatatctctagaacttaaagctgaaatctgcaaatctgtttgtgtgatgaaactatcttttctctctgtgaaataaatgccatactttgttatatatgttagtggtatgtatcagacatattttcaggatggtgcgtcaggatatctggcagtggatttctaatgcttttggctgtatgttatgtaagatttaatatgttgttactgtaagcttaggagttttcctactattaataaatgtgctctatttttacatttatgttcagaaagttatctgactttttgtcctaagtggtatgttcaaggagcctattaatatatttatagtttttgaatgctgtaagtttcaaattgctgtgttacgtcattcattttcttctggttccttaagtttttcaagttatccttttctgaggaaaattattctagaggaacctaaaaagggacaaaaaaattgaaacttcttaggagtctaatcttggtgccttctgttaaaagtcagtgtatcagaaaagaaagcagccatgtaagaggctaacttaaatagaagtgctagaaatatctttgtgtattaacatgcaataaaaggtaccattcaaagcagggggaaaggtaggaagaagaggtaatttttactgaaaattagggcaatgttggtcgccttttattaaaagctttttttaagctttcataaagattgctttttgctatttttgaaaatatggtattatagtttgtatggtaactggtcatatatgacagtctactgcatatatatgaatgactaggattaatctggtgtgtttacataggatatacatagttgaaatctagcatgaaaggttaaaaaggagatactgcacaatatttcttaaaagtaaaatgctgttattgtgatgagtctttggtttaacatcacagtattctgtgatgtctttttaactttttggaaagaggtatcatttgtagaaaaaatttgatttgggttaaatataggtttttaaaactataaatgttgtcttttttatatttttatgaaaaagcagtagaaaattacttttgaagaaaacaggctatttaaatattgaaatatatgtatgttgtgagtttaaggagcctgtaattgtcagttttacaaaaccatctgtgttcaatggttgtaaataaattctcaaaacatcatttcaaaggctgcctacagaatattatcacttgacagatagagttaataaattaccaatcaggcacattttataatgtttgtctctgtaaaggtaatattagcagttaaagaacacggatgagaaaagaatgtgttacataggttgcatcacttgcagttaaataaaactcacaatttgtgctcacaagcttaaa

SEQ ID NO: 901 - DNA, 722 bp, Homo sapiens
attgttttatttctacaaatctgttcattaatattgtgctttaaggctgaaatgaagtatattatgaatttttttaagaaaactcatcaaatttcagggtatcacaaaactttattatattattatactgcccactatttattatatgttatagatgtctgagaggtaaaccaaatattttatttttaatgttaaaaaaacatcaaatttaactttattagcatattttagcaactttgggataaatacggacttttacttgattttgaaataatcccagtgtaggcccatgtgctggatctgttggatgctagaatatgggctttgaacctaatacaaatatattactagaaaatgtgatttttttaaatgccaagtaaattgatattagtgtatgaattagtcatattttaaaacattatgtggttagagaaatgcggttttctgccatgaatgttaagttgcaaatcagtggaaatggagtcgacctcttcggagcacagggtgtcattgccctcgttgttcaagaggccagaatttttctatccccgctaagaaacaaagcatctatgttgagatatgtgtttttttgtttgattaatttgagatcattctaaatactttatacaatattttcacatgcacaaaaatgcgcgttagtggtttttggagaggggtgaggggtgggggaagtgcaaaataaagattattggctatttcat

SEQ ID NO: 902 - DNA, 722 bp, Homo sapiens; identical to SEQ ID NO: 901

SEQ ID NO: 903 - DNA, 722 bp, Homo sapiens; identical to SEQ ID NO: 901

SEQ ID NO: 904 - DNA, 709 bp, Homo sapiens
cctttccctctatagtaagataatcagaataacataaaagaaaactccagttggagtaccggtaaatatttttgtgataagaatatatgaagcttccctccttcccccgtttttagtactaacatgtaaaatgttcaggcttttgtgaaataccttatattttttaagaaaaaggtttctatcatgtcctgtttgcttttgtgcaaattatttttgtttaatgtattttatatcttcgttgcattctaattttgcccttctttaaactgctggagtctcttctcactgcttgtacatttcatcaacttgtataaaaactcttcagactaaaagattgcccctaatgtaaataataaatatttatgaagtagttattttttaaatttttatcgtgtttaattctggctttctctgaaatccactgtgatttcagccaggtctgtaatgacgctggacagaaacaaggctagagaaaaagccatcgttcaaagaaatttcccttgagctcagcctgcgcagtgcccggaaacatggtggggaaagggcccgagcagttggaaggaaaacaaggcaatttaaatttagagtttatgacttgaagttgttttgtttgttgtctattttgtttttgtaaatttctttgacagacttttactaaaaggacatgtagtttccatgaaagtaaaaaaaaaaaacaacaaaaaaccca

SEQ ID NO: 905 - DNA, 709 bp, Homo sapiens; identical to SEQ ID NO: 904

SEQ ID NO: 906 - DNA, 707 bp, Homo sapiens
cctttccctctatagtaagataatcagaataacataaaagaaaactccagttggagtaccggtaaatatttttgtgataagaatatatgaagcttccctccttcccccgtttttagtactaacatgtaaaatgttcaggcttttgtgaaataccttatattttttaagaaaaaggtttctatcatgtcctgtttgcttttgtgcaaattatttttgtttaatgtattttatatcttcgttgcattctaattttgcccttctttaaactgctggagtctcttctcactgcttgtacatttcatcaacttgtataaaaactcttcagactaaaagattgcccctaatgtaaataataaatatttatgaagtagttattttttaaatttttatcgtgtttaattctggctttctctgaaatccactgtgatttcagccaggtctgtaatgacgctggacagaaacaaggctagagaaaaagccatcgttcaaagaaatttcccttgagctcagcctgcgcagtgcccgtaaacatggtggggaaagggcccgagcagttggaaagaaaacaaggcaatttaaatttagagtttatgacttgaagttgctttgtttgttgtctattttgcttttgaaatttctttgacagacttttactaaaaggacatgttgtttccatgaaagtaaaaaaaaaaaacaacaaaaaaacc

SEQ ID NO: 907 - DNA, 547 bp, Homo sapiens
gttcaataggaatagaatgtgagcaccatgtctaatttaggttttctagtagccacatttagaagtgtaaaaaaaaattgttttttttgtgaaagcagttttaacaacatattttttttactatatccaaaatgttatcctttcaacatgtaataaatttcaaaatgattaatgagatactttattttttcatactaagtttttgaaatctggtgtgtaattatctctagagcacaactcaatttgcaccagttgagcaccctgtttgtctagcttttattctctaactcaagagattagtaaacttctgtaactggcaagatagtaagtattttaggctttgctattgtattgtggaagtggtcacagacaatgtgtggctgtgttccaataaaactttatttacaagaacaggtggcaggccggatatggctggcaggctgtggtttacaagccctcactctaactaaatgtatcatctcgtgggttttaatgctcagaagttgatttctattttgggctgctaccaagatagctattgtgataa

SEQ ID NO: 908 - DNA, 547 bp, Homo sapiens; identical to SEQ ID NO: 907

SEQ ID NO: 909 - DNA, 547 bp, Homo sapiens; identical to SEQ ID NO: 907

SEQ ID NO: 910 - DNA, 547 bp, Homo sapiens; identical to SEQ ID NO: 907

SEQ ID NO: 911 - DNA, 112 bp, Homo sapiens
aggagaatcgcttgaacccgggaggctgaggttgcagtgagctgagatcatgccgctgcactccagcctggatgacagaggaagactctgtctcaaaaaaaaaaaaaaaaaa

SEQ ID NO: 912 - DNA, 112 bp, Homo sapiens; identical to SEQ ID NO: 911

SEQ ID NO: 913 - DNA, 112 bp, Homo sapiens; identical to SEQ ID NO: 911

SEQ ID NO: 914 - DNA, 7224 bp, Homo sapiens
aaaattagccaggcgtggtggcgggcgcctgtattcccagctacttgggagtctgaggcaggagaatagcgtgaacctgggaggcagagcttgcagtgagcctagatcgcgtcactgcactccagcctgggcgacagagtgagactctgtctcaaaaaaaaaaaaaaagtcaaaacaagagaacatactaaatgattccatttttttatttatgacttcatgactaccattaagaaaatataacctgttgggaaactgtttctgccttgatgatgttgtacagacaagagataaacagtgaggaatatgcttagatgtattgggaaagacacgggtctgtggcattgtcacaagggtacacgaatactgagagtgaatgctgaaggaatgatccccattggtggtgaccctcaggtgagactagggtgcctgtgtttcagcaaagcctgggcaattggaatgcagggctcctaagattccatgacacccccaccttctaattctgttattgcaactgcagacggttacctggcacgctggccacaatctacctcactcttatcagagtctgagctactggcagtgctttcagctctgagttgaggcacctcaaaccttgtttttgtggtgaaggatcctaaagtgctgtgggagtgatcacatttttcacaacagtaaggtaagaatttcagttactgacatccctcagtcctgattaaacctatttgatttcaccagtttttaacccatcatatgtttgggtttcttctccccagtccctggccccacctcttctgccacaaacgtcagcatggtggtatcagccggcccttggtccagcgagaaggcagagatgaacattctagaaatcaacgagaaattgcgcccccagttggcagagaacaaacagcagttcggaaacctcaaagagagatgttttctaactcaactggccggcttcctggccaaccgacagaagaaatacagtaagatctataggctcaccgtcatgaaagtgatgaatgatgtcctgtcttctctctgagacactaaatgctctctccatcaaaaataatttcatccttcctgtacttctaggaaaacagaaatgggtattttaacattttgttaaagttggaagacagaggtaccaaagtatttagcaactttccatgtttgcaatcagatgggggtgggactagagttaaactcacagttattgatttctaacacaggcacagaacgacctgttttctccaagaggctcaatcatgttttcaagaatcctctctgtaccttataagatcctgcagacaaataacatctagtctgttgttctaaatgtctaggactagtgaacttttattcagttcaaatttccgttgaggcccaagaggcaaagctctgttctagtgactctgaggggaacttggtgatagtagccagtacctgctctgaggggcttcaagaggagtctgctcctaatagaacctgtgctacctataagtgacagcatcaagagcagggagtaggggccgtgcaacgtggctcactcctgtaatctcagcactttgggaggctgaggcgggcagagcacgaggtcagcagtttgagactagcctgggcaacatggagaaaccccatctccactaaaaatacaaaaagtagatgggcgtcgtggagggcaactgtaatcaccactaatcgggaggctgaggcagaagaatcctttgaacccagcaggcagatgttgcagtgagccaagattgcactattgcactccagcatgggtgacagggcaagactcgtcaaaaaacaaacaaacaaaaagataaataaatcaaaaataaaaataaaagagagtaccttggtgagagtgaagtcctgcttcctggtgcacaggctcttgttcctaaagaggaagaaagatcacacccgagaatgtgtggaagcagcagtgcagtgtgcaaagcagggaccctcagcctgtctcctgggctccatccaagttgcttgtcttgtctgtccctcagtttcctcatctgttcagagggtactacaataatacctacctctgtaaattgctgcaatgaattacatgaggcatttcctgtcaatctccttgaacattaattggcacagtgtaaacactatctattagttcttcattctgatgtttctaaattaacacaacgaatctaaatcttaatgctgcctctcatactaataaagtatttgggcatatttccttcatggccttattgtcttatgtctcacactttatgcttcagatatgattcttaaaaccatatctgaatattgatctaaaaatgaaatatttttaaagtccttgacatatttgtccttgaaatacccagtaaaagggaaaccatcagtcccatagtcctaggggccttcccgactgtacaagaaatcactacttcatgccccagtgcagtgttttagaggagaggctgcaaggcttgggaaagtggccccgcattcagagtcagacctcaggggctgtgagttctgactccacttcgttgtggttgaatcatcttgtcaacttccttgatgcgcccttgaggttctctttcttcgtctttaaattttggaggatcagatgccagaaagtcaggagactgaagagtaaagatgtggaaatccctgtctagaccctggtactggggagagttttgtccttgggatggacctggctcctgccctgtaggcagtgaccacagcagcatgtccagccttccactgaggcaggcgtgtctgtcttttctcagagtatgaagagtgtaaagacctcataaaatttatgctgaggaatgagcgacagttcaaggaggagaagcttgcagagcagctgaagcaagctgaggagctcaggtgaggggaccccgtggggggaggcaggcgggtaggtgtgtagatctctgaagtacagcagctcggcggggagaaataagaacgaagctgggccaggggaagggcagaaattgccatggcaggctcatgacacacaaatatttatcagagaacaaggataataataagttctgtgttgcagttgtttcttagagccttgttttctctttttcaaacaagtaattgttgatgtgaaatttacataacacaaaattcaccaaaggagtgggaaccacctagcagcattcagtatactcaaaatggtgtgctattgccaccccacttacccttagtgagaatcacctcctgactgactgcggcttctcattctttcactcaatcaatgttgccttctcgaccctgtcattcttttcttctttcgtcttttcaattcgccccatctgcccctggcctcatttctgtacatggctttgtatctagtggccgcaagatgcactatgtgtattttcacatggaaatgtccatggccagagtgaggaactgaaaagatgtctttttgaaagggaattaggaagacacctacttttgtttacagaagggaaagatgaatggaacatcatcgaggatcttgcaggagccctctctgatacagaggaagcctgtaaaccattttctattctttctcttggccacagacattcctttcaacatgtgctgaccttctgtttcaaggtctccttgaggacattatctcagaagtctctgttgcaatatttgaacggatcactcaaccctttctactcttaaattttctctaccgtctcaccttaggcaatataaagtcctggttcactctcaggaacgagagctgacgcagttaaaggagaagttacgggaagggagagatgcctcccgctcattgaatgagcatctccaggccctcctcactccggatgagccggacaagtcccaggggcaggacctccaagaacagctggctgaggggtgtagactggcacagcaccttgtccaaaagctcagcccaggtaaggtggccataggccctgatgacccaaaaccccaggcttatgagaggctccagacctccatactttcacaatgacagttgtatcagtggggtttttttctgctacacatatgtggccatgacacgatcaggacttcctgggtaagaacagagatgggaaacccatgggtttggaggtcacagtattgcaagtgtccctcctcccttgatggaaggtggtctttggagcaagaggcagcatctatctagttttaaaggacaggaaggaggctgtgatgggagggcgcttgttggagtgaaaagagctctgggctaagaatgaaggttcccaggctgtctttttggcaatgttcttagtaagtgtcggtgagtgagtgatttatctttccagagtttctctctctccatctgcaaaggcagacaaattgtctcttgcaagggtctgaagcatccaaatatgggaacacttacgaatgcttttcaaaatgagatgaagcccctctccatgtggtgttggagaaggcacttgatgtgggggcatttggtggtaggaagtgcttcagactggagcactccccatggatagaatgtccctgaataacacagcagaagccacatggagggcctgtgcagtctcatgacgcatagaggactgtgggacaagtttgtcctctcctaagagaaagaatgaggtttgaaatgcgaactgtgacaggacaccaagcctgttcctgggaatcagatctgtggcaggatgggggagacagctgccaaagtccagagagaggctgcacaagccttcagtgatatgggaagcaaaaggtcttttcagtatttggccacatcttgatggtggccctccacatcagaaatgcattgcccgatggagcaggaaaccatgccagggcattttgtgaaagataaaacatgagagttttcagtacaatgctgaaccatacatagatgttcatgtctctgtgcacgttgggctgactgtgcttgcagaatgtgaagtgggaaatatctgaatgaacattttgtatttatagaaaatgacgaagatgaggatgaagatgttcaagttgaggaggatgagaaagtactggaatcatctgcccccaggtaacactgaatactcaggagcaagtaatgggtggtaacatatgaagatgtctaggaggcacaccctctctggcatctatggtgggccaaaagcccgcatccccttggccacagtatgtgaaattgaacccagcttagacacagggtgcggcagctgtcgtgtttctctatgtgtgccaagtgtcatgtctgtaccatacagggatagctgagtcttcatcctcctcagctcctatctgtccagtgcactgaacaccagctgctctcttcctctctggctcccatggcagccatggtctgttgcagagagaagaggattgcctgttccctctttaagggaacctccgttttgctttctggaaccactctcttaatgccgcctgtcaaaaccagctagtactccctggggtccaatccctctgtgtttaatcttctgtcatctctgtcccacctggctcatcagggaggtgcagaaggctgaagagagcaaagtcgctgaggactcactggaggaatgtgccatcacttgttcaaatagccacggcccttgtgactccaaccagcctcacaagaacatcaaaatcacatttgaggaagacgaagtcaactcaactctggttgtagacagagaatcctctcatgatgaatgtcaggatgctctaaacattctcccaggtagcctctattttccttgtgtctcatacctctgtctaggctatggaagatcaattctgaggacaggctgtatatacacatattgttattgttttagtcagaaactaggatggagctaggtgctgtgactcacacatataatcacagcactttggaaggcccaagtgggacgatgacttgagttcaggagttgaagaccagcctacacaatatggtgaaacccatctttacaaagaacacaaaaaattaggcaggcatggtgctgcatgcctatagtcccaactgctcaggagacttaggtgggaggatgggctgagatgatcctcccaccctcattcacttctgtcaggctagactctctctccttttcattggcttgtcttagctattaataagtctcggctgggcgcagtgggtcacacctgtaatccgagcactttgggaggccgaggtgggtggatcaggaggtcaggagattgagaccatcctggctaacacggtgaaaccccgtctttactaaaaatgcaaaaaaaaaaaaatagctgggcgtggtggtgggcgcctgtagtcccagctactcaggaggctgaggcaggagaatggcatgaacccaggaaccggagcttgcagtgagccgagattgtgccactgcactccagcctgggagacagagcgagactccatctcaaaaaaaaaaaaaaataaagtctctgaccaggggcgctggctcacatcttaatcccaacactttgggaggccgaggtgggcggaacacctgagctcaggagttcgaaaccagcctgtccaagatggcgaaaccccatctctactaaaaatacaaaaattagctggcatgttacttggcccttgtaatcccagatgcttggccggctgagggatgagaatcacttgaacccgggcggcagaggtggcagtgagctgagattgtgcctctgcacttcagcctgcgtgacagagtgagactctgtctcaaacaaaaaaaccaaaaaagaaaaaaattaaaaaagcaaaatgaaatcttttgtgctacacagaaacattggccactcatggggtaaaaatctcagggccaagccttgctttatagaaacgtataagcaagaaaagtgtagaagtgtttatgtcttggtttcaaggtgactgcatagctaagacaagttgacttaaaggagatcaagactggagatgacaagagtgaaaccagggaaacaacatcttcaaataagtaaacaaggctgccagtgacatccctcagtcctgattaagcctatttgatttcaccagtttttaacccatcatgtgtttgcctttcttctccccagtccctggccccacctcttctgccacaaacgtcagcatggtggtatcagccggccctttgtccagcgagaaggcagagatgaacattctagaaatcaatgagaaattgcgcccccagctggcagagaagaaacagcagt

SEQ ID NO: 915 - DNA, 1635 bp, Homo sapiens
cacgtgtatatatattatatatatatacacacgtgtgccatgttggtttgctgcacccattaactcgtcatttacactaggtatatatcctaatgctatccctcccccagccctcaccccatgacaggccctggtgtgtgatgttccccgccctgtgtccaagtgttctcattgttcaattcccacccatgagtgagaacatgctcgcaccgccgcttctaaatgttttaaaaacaaagacaccaatgcccttcattggggaaatgaaagacttttaagtaaaacgattttgagtgaaataatatttgttgttttaaacagttaatattaaccactctccatcatatattgaaattaacttaagatgtgaaagttaaaattagaaaccttgtaaaggaaaaataggaaatagtttcatgaacttgacacaggaaaatatttcttagactagatactgtagcactcaccacaataagaaatcaagcgaattgcacttcatttttaaaaagcttctccttattatgttgttgtttaacaacttaaacgctatctctagaccaggaataattatttgctatataatacagcaaaaaatatgtatgtataaatggactcattcaaaatatataaagaactcctattacaaagaaattgacaaacagcccagtatatcaatgaatataaaaatttgagaagatattttccataagaagatatctaaatgaacattaggcatgagaaaaccaaattttaggatatcactacacacctggcatagtttaaaagactgaaaatattaagtgtgtgggaatgtagagcaactggaaatggcctacatctttcatagaaatgtaaaacaatacaaatactttgcaaaactctgtccaacattttctacccattcaccaagcaactccatccctagctatagatacccaggaaaataagtatgtatcttcacagaaataattgtatgagaatattcatagttacttatgcacagtagttatcaagtaaacctgtctcccatcagaaaaatggatatcaaattgtgtgataatcatacaatcaataggatattacttggccaaaacaaaatgaaacaagggaaaaacacaatcaaacaaattagtggcatatattcccacctgagtaaagagaagtcggccgtgtgcggtggctcacgcctgtaatcccagcactttgggaggccgaggcggcagatcacgaggtcaggagatcgagaccatcctggctaacacagtgaaaccccgtctctactaaaaatacaaaaaaaaaaaaaagaaaaattagccgggcgtggtggcgggcgcctgtattcccagctacttgggagtctgaggcaggagaatagcgtgaacctgggaggcagagcttgcagtgagcctagatcgcgtcactgcactccagcctgggcgacagagtgagactctgtctcaaaaaaaaaaaaaaaaaaagtcaaaacaagagaacatactaaatgattccatttttttatttatgacttcatgactaccattaagaaaatataacctgttgggaaactgtttctgccttgatgatgttgtacagacaagagataaacagtgaggaatatgcttagatgtattggga

SEQ ID NO: 916 - DNA, 142 bp, Homo sapiens
catagtaaatgattccatttttttatttatgacttcatgactaccattaagaaaatataacctgttgggaaactgtttctgccttgatgatgttgtacagacaagagataaacagtgaggaatatgcttagatgtattggga

SEQ ID NO: 917 - DNA, 5403 bp, Homo sapiens
cacgtgtatatatattatatatatatacgtgtgccatgttggtttgctgcacccattaactcgtcatttacattaggtatttctcctaatgctatccctcccccagccctcaccccatgacaggccctggtgtgtgatgttccccgtcctgtgtccaagtgttctcattgttcagttcccacccatgagtgagaacatgctcgcaccgccgcttctaaatgttttaaaaacaaagacaccaatgcccttcattggggaaatgaaagacttttaagtaaaacgattttgagtgaaataatatttgttgttttaaaaagttaatattaaccactctccatcatatgttgaaattatcttaagatgtgaaagttaaaattagaaaccttgtaaaggaaaaataggaaatagtttcatgaacttgacacaggaaaatatttcttagactagatactgtagcactcaccacaataagaaatcaagcgaattgcacttcatttttaaaaagcttctccttattatgttgttgtttaacaacttaaacgctatctctagaccaggaataattatttgctatataatacagcaaaaaatatgtatgtataaatggactcattcaaaatatataaagaactcctattacaaagaaattgacaaacagcccagtatatcaatgaatataaaaatttgagaagatattttccataagaagatatctaaatgaacattaggcatgagaaaaccaaattttatgatatcactacacacctggcatagtttaaaagactgaaaatattaagtgtgtgggaatgtagagcaactggaaatggcctacatctttcatagaaatgtaaagcaatacaaatactttgcaaaactctgtccaacattttctacccattcaccaagcaactccatccctagctatagatacccaggaaaataagtatgtatcttcacagaaataattgtatgagaatattcatagttacttatgcacagtagttatcaagtaaacctgtctcccatcagaaaaatggatataaaattgtgtgataatcatacaatcaataggatattacttggccaaaacaaaatgaaacaagggaaaaacacaatcaaacaaattagtggcatatatacccacctgagtaaagagaagtcggccgggcgcggtggctcacgcctgtaatcccagtactttgggaggccgaggcggcagatcacgaggtcaggagatcgagaccatcgtggctaacacagtgaaaccccgtctctactaaaaatacaaaaaaaaaaaaaaaaaaaaaaattagccgggcgtggtggcgggtgcctgtattcccagctacttgggagtctgaggcaggagaatagcgtgaacctgggaggcagagcttgcagtgagcctagatcgcgtcactgcactccagcctgggcgacagagtgagactctgtctccaaaaaaaaaaaaagaaaaagtcaaaacaagagaacatactaaatgattccatttttttatttatgacttcatgactaccattaagaaaatataacctgttgggaaactgtttctgccttgatgatgttgtacagacaagagataaacagtgaggaatatgcttagatgtattgggaaagacacgggtctgtggcattgtcacaagggtacacgaatactgagagtgaatgctgaaggaatgatccccattggtggtgaccctcaggtgagactagggtgcctgtgtttcagcaaagcctgggcaattggaatgcagggctcctaagattccatgacacccccaccttctaattctgttattgcaactgcagacggttacctggcacgctggccacaatctacctcactcttatcagagtctgagctactggcagtgctttcagctctgagttgaggcaccttgaaccttgtttttgtggtgaaggatcctaaagtgctgtggggagtgatcacatttttcacaacagtaaggtaagaatttcagttactgacatccctcagtcctgattaaacctatttgatttcaccagtttttaacccatcatatgtttgggtttcttctccccagtccctgactccacctcttctgccacaaacgtcagcatggtggtatcagccggcccttggtccagcgagaaggcagagatgaacattctagaaatcaacgagaaattgcgcccccagttggcagagaacaaacagcagttcggaaacctcaaagagagatgttttgtaactcaactggccggcttcctggccaaccagcagaagaaatacagtaagatctataggctcaccatcatgaaagtgatgaatgatgtcctgtcttctgagacactaaatgctctctccatcaaaaataatttcatccttcttgtacttgtaggaaaacagaaatgggtattttaacattttgttagttggaagacagaggtaccaaagtatttagcaactttccatgtttgcaatcagatgggggtgggactagagttaaactgccatttattgatttctaacacaggcacagaacgacctgttttctccaagaggctcaatcatgttttcaagaatcctctctgtaccatataagatcctgcagacaaataacatgtagtctgttgttctaaatgtctaggactagtgaacttttattcagttcaagtttctgttgaggcccaacaggcaaagctgtgttctagtgactctgagggaaacttggtgatagtagccagtacctgctctgaggggcttcaagaggagtctgctcctaatagaacctgtgctatctataagtgacagcatcaagagcagggagtaggggccgtgcaacgtggctcactcctgtaatctcagcactttgggaggctgaggcgggcagagcacgaggtcaggagtttgagactagcctgggcaacatggagaaaccccatctccactaaaaatacaaaaagtagatgggcgtcgtggtgggcaactgtaatcaccactaatcgggtggctgaggcagaagaatcctttgaacccagcaggcagatgttgcagtgagccaagattgcactattgcactccagcatgggtgacagggcaagactcgtcaaaaaacaaacaaaaagataaataaatcaaaaataaaaataaaaagcagagagtagcttggtgagagcgaagtcctgtttcctggtgcacaggctcttgttcctaaagaggaagaaagatcacacccgagaatgtgtggaagcagcagtgcagtgtgcaaagcagggaccctcagcctgtctcctgggctccatccatgttgcttgtcttgtctgtccctcagtttcctcatctgttcagagggtactacaataatacctacctctgtaaattgctgcaatgaattacatgaggcatttcctgtcaatctccttgaacattaattggcacagtgtaaacactatctattagttcttcattctgatgtttctaaattaacacaaactaatcttatgctgtttctaaattaacacaactaatctaaatcttaatgctgcctctcatactaataaagtatttgggcatatttccttcatggccttattgtcttatgtctcacactttatgcttcagatatgattcttaaaaccatatctgaatattgatttaaaaatgaaatatttttaaagtccttgacatatttgtccttgaaatacccagtaaaagggaaaccatcagtcccatagtcctaggggccttcccgactgtacaagaaatcactacttcatgccccagtgcagtgttttagaggagaggctgcaaggcttgggaaagtggccccgcattcagagtcagacctcaggggctgtgagttctgactccgcttcgttgtggttgaatcatcttgtcaacttccttgacgcgcccttgagtttctctttcttcatctttaaattttggaggatcagatgccagaaagtcaggagactgaagagtaaagatgtggaaatccctgtctagaccctggtactggggagagttttgtccttgggatggacctggctcctgccctgtaggcagtgaccacagcagcatgtccagccttccactgaggcaggcgtgtctgtcttttctcagactatgaagagtgtaaagacctcataaaatttatgctgaggaatgagcgacagttcaaggaggagaagcttgcagagcagctcaagcaagctgaggagctcaggtgaggggaccccgtagggggaggcaggcgggtaggtgtgtagatctctgaagtacagcagctcggcggggagaaataagaacgaagctgggccaggggaagggcagaaattgccatggcaggctcatgacacacaaatatttatcagagaacaaggataataataagttctgtgttgcagttgtttcttagagccttgttttctctttttcaaacaagtaattgttgatgtgaaatttacataacacaaaattcaccaaaggagtgggaaccacccagcagcattcagtataatcaaaatggtgtgctatcgccaccccacttacccttagtgagaatcaccttctgactgactgcgtcttctcattctttcactcaatcaatgttgccttctcgaccctgtcattcttttcttctttcatcttttcatttcgccccatctgcacctggcctcatttctgtacatggctttgtatctagtggccgcaagatgcactatgtgtattttcacatggaaatgtccatggccagagtgaggaactgaaaggatgtctttttgaaacggaattaggaagacacctacttttgtttacagaagggaaagatgaatggaacatcatcgaggatcttgcaggagccctctctgatacagggaaagcctgtagaccattttctgttctttctcttggccacagacattcctttcaacatgtgctgaccttctgctcgaaggtctccttgagaacattgtctcagaaatctctgttgcaatatttgaacggatcactcaaccctttctactcttaaattttctctaccgtctcaccttaggcaatataaagtcctggttcactctcaggaacgagagctgacccagttaagggagaagttacgggaagggagagatgcctcccgctcattgaatgagcatctccaggccctcctcactctggatgagccggacaagtcccaggggcaggacctccaagaacagctggctgaggggtgtagactggcacagcaccttgtccaaaagctcagcccaggtaaggtggccataggccctgatgacccaaaaccccaggcttatgagaggctccagacctccatactttcacaatgacagttgtatcactggggtttttttctactacacatatgtggccat

SEQ ID NO: 918 - DNA, 1636 bp, Homo sapiens
cacgtgtatatatattatatatatatatacacgtgtgccatgttggtttgctgcacccattaactcgtcatttacaccaggtatatatcctaatgctatccctcccccagccctcaccccatgacaggccctggtgtgtgatgttccccgccctgtgtccaagtgttctcattgttcaattcccacccatgagtgagaacatgctcgcaccgccgcttctaaatgttttaaaaacaaagacaccaatgcccttcattggggaaatgaaagacttttaagtaaaacgattttgagtgaaataatatttgttgttttaaaaagttaatattaaccactctccatcatatattgaaattaacttaagatgtgaaagttaaaattagaaaccttgtaaaggaaaaataggaaatagtttcatgaacttgacacaggaaaatatttcttagactagatactgtagcactcaccacaataagaaatcaagcgaattgcacttcatttttaaaaagcttctccttattatgttgttgtttaacaacttaaacgctatctctagaccaggaataattatttgctatataatacagcaaaaaatatgtatgtataaatggactcattcaaaatatataaagaactcctattacaaagaaattgacaaacagcccagtatatcaatgaatataaaaatttgagaagatattttccataagaagatatctaaatgaacattaggcatgagaaaaccaaattttaggatatcactacacacctggcatagtttaaaagactgaaaatattaagtgtgtgggaatgtagagcaactggaaatggcctacatctttcatagaaatgtaaaacaatacaaatactttgcaaaactctgtccaacattttctacccattcaccaagcaactccatccctagctatagatacccaggaaaataagtatgtatcttcacagaaataattgtatgagaatattcatagttacttatgcacagtagttatcaagtaaacctgtctcccatcagaaaaatggatataaaattgtgtgataatcatacaatcaataggatattacttggccaaaacaaaatgaaacaagggaaaaacacaatcaaacaaattagtggcatatatacccacctgagtaaagagaagtcggccgtgtgcggtggctcacgcctgtaatcccagcactttgggaggccgaggcggcagatcacgaggtcaggagatcgagaccatcctggctaacacagtgaaaccccgtctctactaaaaatacaaaaaaaaaaaaaagaaaaattagccgggcgtggtggcgggcgcctgtattcccagctacttgggagtctgaggcaggagaatagcgtgaacctgggaggcagagcttgcagtgagcctagatcgcgtcactgcactccagcctgggcgacagagtgagactctgtctcaaaaaaaaaaaaaaaaaaaagtcaaaacaagagaacatactaaatgattccatttttttatttatgacttcatgactaccattaagaaaatataacctgttgggaaactgtttctgccttgatgatgttgtacagacaagagataaacagtgaggaatatgcttagatgtattggga

SEQ ID NO: 919 - DNA, 142 bp, Homo sapiens
catactaaatgattccatttttttatttatgacttcatgactaccattaagaaaatataacctgttgggaaactgtttctgccttgatgatgttgtacagacaagagataaacagtgaggaatgtgcttagatgtattggga

SEQ ID NO: 920 - DNA, 17773 bp, Homo sapiens
aaaattagccaggcgtggtggcgggcgcctgtattcccagctacttgggagtctgaggcaggagaatagcgtgaacctgggaggcagagcttgcagtgagcctagatcgcgtcactgcactccagcctgggagacagagtgagactctgtctcaaaaaaaaaaaaaagtcaaaacaagagaacatactaaatgattccatttttttatttatgacttcatgactaccattaagaaaatataacctgttgggaaactgtttctgccttgatgatgttgtacagacaagagataaacagtgaggaatgtgcttagatgtattgggaaagacacgggtctgtggcattgtcacaagggtacacgaatactgagagtgaatgctgaaggaatgatccccattggtggtgaccctcaggtgagactagggtgcctgtgtttcagcaaagcctgggcaattggaatgcagggctcctaagattccatgacacccccaccttctaattctgttattgcaactgcagaccgttacctggcacgctggccacaatctacctcactcttatcagagtctgagctactggcagtgctttcagctctgagttgaggcacctcgaaccttgtttttgtggtgaaggatcctaaagtgctgtgggagtgatcacatttttcacaacagtaaggtaagaatttcagttactgacatccctcagtcctgattaaacctatttgatttcaccagtttttaacccatcatatgtttgagtttcttctccccagtccctgactccacctcttctgccacaaacgtcagcatggtggtatcagccggcccttggtccagcgagaaggcagagatgaacattctagaaatcaacgagaaattgcgcccccagttggcagagaacaaacagcagttcgtaaacctcaaagagatgttttctaactcaactggccggcttcctggccaaccgacagaagaaatacagtaagatctataggctcaccgtcatgaaagtgatgaatgatgtcctgtcttctctctgagacactaaatgctctctccatcaaaaataatttcatccttcctgtacttctaggaaaacagaaatgggtattttaacattttgttaaagttggaagacagaggtaccaaagtatttagcaactttccatgtttgcaatcagatgggggtgggactagagttaaactcacagttattgatttctaacacaggcacagaacgacctgttttctccaagaggctcaatcatgttttcaagaatcctctctgtaccatataagatcctgcagacaaataacatgtagtctgttgttctaaatgtctaggactagtgaacttttattcagttcaagtttctgttgaggcccaacaggcaaagctctgttctagtgactctgaggggaacttggtgatagtacccagtacctgctctgaggggcttcaagaggagtctgctcctaatagaacctgtgctatctataagtgacagcatcaagagcagggagtaggggccgtgcaacatggctcactcctgtaatctcagcactttgggaggctgaggcgggcagagcacgaggtcagcagtttgagactagcctgggcaacatggagaaaccccatctccactaaaaatacaaaaagtagatgggcgtcgtggcgggcaactgtaatcaccactaatcgggaggctgaggcagaagaatcctttgaacccagcaggcagatgttgcagtgagccaagattgcactattgcactccagcatgggtgacagggcaagactcgtcaaaaaacaaacaaaacaaaaagataaataaatcaaaaataaaaataaaaagcagagagtagcttggtgagagtgaagtcctgcttcctggtgcacaggctcttgttcctaaagaggaagaaagatcacacccgagaatgtgtggaagcagcagtgcagtgtgcaaagcagggaccctcagcctgtctcctgggctccatccaagttccttgtcttgtctgtccctcagtttcctcatctgttcagagggtactacaataatacctacctctgtaaattgctgcaatgaattacatgaggcatttcctgtcaatctccttgaacattaattggcacagtgtaaacactatctattagttcttcattctgatgtttctaaattaacacaaactaatcttatgctgtttctaaattaacacaacgaatctaaatcttaatgctgcctctcatactaataaagtatttgggcatatttccttcatggccttattgtcttatgtctcacactttatgcttcagatatgattcttaaaaccatatctgaatattgatttaaaaatgaaatatttttaaagtccttgacatatttgtccttgaaatacccagtaaaagggaaaccatcagtcccatagtcctagggaccttcccgactgtacaagaaatcactacttcatgccccagtgcagtgttttagaggagaggctgcaaggcttgggaaagtggccccgcattcggagtcagacctcaggggctgtgagttctgactccgcttcgttgtggttgaatcatcttgtcaacttccttgacacgcccttgagtttctctttcttcgtctttaaattttggaggatcagatgccagaaagtcaggagactgaagagtaaagatgtggaaatccctgtctagaccctggtactggggagagttttgtccttgggatggacctggctcctgccctgtaggcagtgaccacagcagcatgtccagccttcaactgaggcaggcgtgtctgtcttttctcagagtatgaagagtgtaaagacctcataagatttatgctgaggaatgagcgacagttcaaggaggagaagcttgcagagcagctcaagcaagctgaggagctcaggtgaggggaacccgtagggggaggcaggcgggtaggtgtgtagatctctgaagtacagcagctcggcggggagaagtaagaatgaagctgggccaggggaagggcagaaattgccatggcaggctcatgacacacaaatatttatcagagaacaaggataataataagttctgtgttgcagttgtttcttagagccttgttttctctttttcaaacaagtaattgttgaggtgaaatttacataacacaaaattcaccaaaggagtgggaaccacccagcagcattcagtataatcaaaatggtgtgctatcgccaccccacttacccttagtgagaatcaccttctgactgactgcgtcttctcattctttcactcaatcaatgttgccttcttgaccctgtcattcttttcttctttcatcttttcaattcgccccatctgcacctggcctcatttctgtacatgactttgtatctagtggccgcaagatgcactatgtgtattttcacatggaaatgcccatggccagagtgaggaactgaaaggatgtctttgaaacggaattaggaagacacctacttttgtttacagaagagaaagatgaatggaacatcatcgaggatcttgcaggagccctctctgatacagggaaagcctgtagaccattttctgttctttctcttggccacagacattcctttcaacatgtgctgaccttctgcttgaaggtctccttgtgaacattgtctcagaaatctctgttgcaatatttgaacggatcactcaaccctttctactcttaaattttctctaccgtctcaccttaggcaatataaagtcctggttcactctcaggaacgagagctgacgcagttaaaggagaagttacaggaagggagagatgcctcccgctcattgaatgagcatctccaggccctcctcactctggatgagccggacaagtcccaggggcaggacctccaagaacagctggctgaggggtgtagactggcacagcaccttgtccaaaagctcagcccaggtaaggtggccataggccctgatgacccaaaaccccaggcttatgagaggctccagatctccatactttcacaatgacagttgtatcagtggggtttttttctgctacacctatgtggccatgacatgaccaggacttcctgggtaagaacagagatgggaaacccatggtttggaggtcacagtattgcaagtgtccctccttccttgatggaaggtggtctttggagcaagaggcagcatctatctagttttaaaggacaagaaggaggctgtgatgggagggcgcttgttggagtgaaaagagctctgggctaagaatgaaggttcccaggctgtctttttggcaatgttcttagtaagtgtcggtgagtgagtgatttatctttccagagtttctctctctccatctgcaaaggcagacaaattgtctcttgcaagggtctgaagcatccaaatatgggaacacttacgaatgcttttcaaaatgagatgaagcccctctccatgtggtgttggagaaggcacttgatgtgggggcatttggtggtaggaagtgcttcagactggagcactccccatggatagaatgtccctgaataacacagcagaagccacatggagggcctgtgcagtctcatgacgcatagaggactgtgggacaagtttgtcctctcctaagagaaagaatgaggtttgaaatgcgaactgtgacaggacaccaagcctgttcctgggaatcagatctgtggcaggatgggggagacagctgccaaagtccagagagaggctacacaagcctccagtgatatgggaagcaaaaggtcttttcagtatttggccacatcttgatggtggccctccacatcagaaatgcattgcccgatggaccaggaaaccatgccagggcattttgtgaaagataaaacatgagagttttcagtacaatgctgaaccatacatagatgttcatgtctctgtgcacgttgggctgactgtgcttgcagaatgtgaagtgggaagtatctgaacgaacattttgtatttatagaaaatgacgaagatgaggatgaagatgttcaagttgaggaggatgagaaagtgcagaaatcatctgcccccaggtaacactgaatactcaggagcaagtaatgggtggtaacatatgaaaatgtctaggaggcacaacctctctggcatctatggtggaccaaaagcccgcatccccttggccacagtatgtgaaattgaacccagcttagacacagggtgcggcagctgtcgtgtttctctatgtgtgccaagtgtcatgtctgtaccatacagggatagctgagtcttcatcctcctcagctcctatctgtccagtgcactgaataccagctgctctcttcctctctggctcccatggcagccatggtctgttgcagagagaagaggattgcctgtttcctctttaagggaacctccattttgctttctggaaccactctcttaatgccacctgtcaaaaccagctaggactccctggggtccaatccctctgtgtttaatcttctgtcatctctgtcccacctggctcatcagggaggtgcagaaggctgaagtgagcaaagtccctgaggactcactggaggaatgtgccatcacttgttcaaatagccacggcccttgtgactccaaccagcctcacaagaacatcaaaatcacatttgaggaagacgaagtcaactcaactctggttgtagacagagaatcctctcatgatgaatgtcaggatgctctaaacattctcccaggtagcctctattttccttgtgtctcatacctctgtctaggctatggaagattaattctgaggacaggctgtatatacacatattgttattgttttagtcagaaactaggatggagctaggtgctgtgactcacacatataatcacagcactttggaaggcccaagtgggacgatgacttgagttcaggagttgaagaccagcctggacaatatggtgaaacccatctttacaaagaatacaaaaaattaggcaggcatggtgctgcatgcctatagtcccaactgctcaggagacttaggtgggaggatcggctgagacgatcctcccacgctcgttcactcctctcaggctagactctctctccttttcattggcttgtcttagctattaataagaagtctcggcctggcgcggtggctcacacatgtaatccgagcactttgggaggccggggcgggtggatcacgaggtcaggagatcgagaccatcctggctaacacggtgaaacgccgtctttactaaaaatacaaaaaaaaaaaaaaaaattagctgggcgcggtggtgggcgcctgtagtcccagctactcaggaggctgagacaggagaatggcatgaacccaggaaccggagcttgcagtgagccgagattgtgccactgcactccagcctgggagacagagcgagactccatctcaaaaaaaaaagtaagtctctgaccaggggcgctggctcacatcttaatcccagcactttgggaggctgaggtgggcagaacacctgagatcaggagttcgaaaccagcctgtccaagatggcgaaaccccatctctactaaaaatacaaaaattagctggcatgttacttggcgcttgtaatcccagatgcttggcaggctgagggatgagaatcgcttgaacccgggcggcagaggtggcagtgagctgagattgtgcctctgcactgcagcctgcacgacagagtgagactccgtctcaaacaaaaaacaaaaaaccaaaaaagaaaaaaattaaaaaagcaaaatgaaatcttttgtgctacacagaaacattggccactcatggggtaaaaatctcagggccaagccttgctttatagaaacttataagcaagaaaagtgtagaagtgtttatgtcctggtttcaaggtgactgcatagctgagacaagttgacttaaaggagatcaagactggagatgacaagagtgaaaccagggaaacatcatcttcaaataagtaaacaaggctgccagtgacatccctcagtcctgattaagcctatttgatttcaccagtttttaacccatcatgtgtttgcctttcttctccccagtccctggccccacctcttctgccacaaacgtcagcatggtggtatcagccggccctttgtccagcgagaaggcagagatgaacattctagaaatcaatgagaaattgcacccccagctggcagagaagaaacagcagttcagaaacctcaaagagaaatgttttctaactcaactggccggcttcctggccaaccagcagaacaaatacagtaagatctacaggctcaccatcatgaaagtgatgaatgatatcctgtcttctctctgagacactaaatgctctctccatcaaaaataatttcatccttcctgtacttctaggaaaacagaaatgggtattttaacattttgtcaaagttggaagacagaggtaccaaagtatttagcaactttccatgttttcaatcaggtgggggtgggactagagttaaactgccatttattgatttctgacacaggcacagaatgacctgttttctccaagaggctcaatcgtgttttcaagaatcctctctaccatataagatcctgcagacaaataacatctagtctgttgttctaaatgtctgagactagtgaacttttattcagttcaagtttctgttgaggcccaacagacaaagctctgttctagtgactctgagggaaacttggtgatagtagccagtacctgctctgagggcttaaagaggagtctattcctaatagaacctgtgctgtctataagtgacagcatcaagagcagggagtaggggccgtgcatggtggctcactcctgtaatcccagcactttgggaggctgaggcgggcagatcatgaggtcaggagtttgggaccagcctgggcaacatggagaaaccccatcttcactaaaaatacaaaaagtagatgggcgtggtggcaggtgactgtaatcacccctgctcaggaggctgaggcaagagaatcctttgaacccaggaggctgaggttgcagtgagccaaggttttgccattgcactccagcctgggcgacagggcaagactgttaaaaataataataataataatgataaataaaaataagaataaaaagcagagagtagcttggtgagagtgaagtcctgcttcctggggcacagattcttgttgctaaagaggaagaaagatcccacccgagaatgtgtggagatagcagtgcagtgtacagagcagggaccgtgggtctgtctcctgggatccatccaagttgcttgtcttgtctgtccctcagtttcctcacctgttcagagggtactacaataatacctacctctgtaaattgctgcagtgaattacatgagctatttcttgtcagtctcctagaacatttattggcacacagtaaacactatctattagttcttcattctgctgtttctaaattaacacaaactttattagcatttgggcatatttccttcatggccttatggtgttatgtgtcacactttatgcttcagatatgattcttaaaatcataactgaagatatgatttaaaaatcaaagattttaaaaatctttcgcatacttgtccttgaaattcccagtgaaagggaaaccatcagtcccatagtcctaggggccttcccgactgtacaagaaatcactacttcatgccccagtgcagtgttttagaggagaggctgcaaggcttgggaaagtggccccgcattcagagtcagacctcagggactgtgaattctgactccacttcgttgtggttgaatcatcttgtcaacttccttgatgtgcccttgaggttctctttcttcatctccaaattttggaggattagatgccagaaagtcaggagactgaagagtaaagatgtggaaatccctgtctagaccctggtactggggagagttttgtccttgggatggacctggctcctgtcctgtaggcaatgaccacagcagcatgtccagccttccactgaggcaggcgtgtctgtcttttctcagaatatgaagagtgcaaagatctcataaaatctatgctgaggaatgagcgacagttcaaggaggagaagcttgcagagcagctcaagcaagctgaggagctcaggtgaggggaccccatgggggcaggcaggggggcaggtgtgtaaatctctgaagtacagcagctcggtggggagatgtaagagctaagctgggccaggggaagggcaggaattgccatggcaggctcgctacacacaaatatttatcaaacagagaaggaggatagtaaaaatgtatgggttgcagttgtttctcagagccttgttttctctttttcaaacaagtaattgttgatgtgaaatttacataacacaaaattaaccaaaggagtgtgaaccacacagcagcattcagtatactcaaaatggtgtgccatcaccaccccacttacccttagtgagaatcacctcctgactgactgcggcttctcattctttcactcaatcaatgttgccttctcgaccctgtcattcttttcttctttcgtcttttcaattcgccccatctgcacctggcctcatttctgtacatggctttgtatctagtggccgcaagatgcactatgtgtattttcacatggaattgtccatggccagagtgaggaactgaaaggatgtctttttgaaatggaattaggaagacacctacttttgtttacagaagagaaagatgaatggaacatcatcgaggatcttgcaagagctctctgtgatacagaggaagcctgtaaaccattttctattctttctcttggccacagacattcctttcaacatgtgctgaccttctgtttcaaggtctccttgaggacattgtctcagaagtctctgttgcaatatttgagcggatcactcaaccctttccactcttaaattttctctaccgtctcaccttaggcaatataaagtcctggttcacactcaggaacgagagctgacccagttaagggagaagttgcgggaagggagagatgcctcccgctcattgaatgagcatctccaggccctcctcactccggatgagccggacaagtcccaggggcaggacctccaagaacagctggctgaggggtgtagactggcacagcaccttgtccaaaagctcagcccaggtaaggtggccataggccctgatgacccaaaatcccaggcttatgagagactccagacctccatactttcacaatgacagttgtatcaatggtgtttttttccactaagcttatgtggccatgatatgaccaggacttcttgggtaagaacggagatgggaaacccatggggttggaggtcacagtattgcaagtgtccctcctcccttgatggaaggtggtctctggagcaagaggcagcatctgtctagttttaaaggacaggaaggaggctgcgatgggagcaggcttgttagagtgaaaagagctctggactaagaatgaaggttcccaggctgtcttttcggcaatgttcttagtaactgtcagagagtgaatgacttgtccttcctgagtttctctctctctgtggcagacaaattgtctcttgcaagggtcgaagcattcaaatgtgggaacacttacaactgctttccaaaatgagatgaaggccctcgccgtgtgatgttggagaaggcactttatgtgggggcgttttgtggtaggaagtgcttcagactggagcgctccccatggatagaatgtccctgaagaacacagcagaagccacttggaggcttgaaatcttctgatgcatagaggactgtgggacatgtttgtctgcttctaagagaaagaattaggtttgaaatgcaaaccgtgacaggacaccaagcctgtgcctgggaatcagatctggcaggatgggggagacagctgccaacgtccagagagaggctgcacaagcctccagtgatatgggaagcaaaaggtcttttcaatatttggccacatcttgatggtggccctccagatcagaaatgcattgcctgatggatcaggaaaccatgccagggcattctgttaaagataaaacatgagagttttcagttgaacggtgacccatgcctagatgttcatgtctctgttgcacattgggctgactgtgcttgcagactgtgaagtgggaaatatctgaacgaacacttctgtatttacagaaaatgacaacgatgacgatgaagatgttcaagttgaggtggctgagaaagtgcagaaatcgtctgcccccaggtaacactgaatactcaggaacaattaatggatggtaacatatgaggaatatctaggaggcacaccctctctggcatctatgatgggtcaaaaacccgcattcgcttggccacagtatgtgaaatataacccagcttagacacagggtgcggtagctgtcatgtttctctatgtgtgccgagtgtcatgtctgtaccgtacagggatagctgagtcttcatcctcctcagctcctatctgtccagtgcaatgaacagcagctgctctcttcctctctggttcccatggcagccatgctctgttgcagagagaacaggattgcatgttccctcttaatgggaacctccattttgctttctgggaccactctcttaatgccacctgtcaaaaccagctaggactccctggggtccaatccctctgtgtttaatcttctgtcatctctgtcccacctggctcatcagggagatgcagaaggctgaagaaaaggaagtccctgaggactcactggaggaatgtgccatcacttattcaaatagccatggcccttatgactccaaccagccacataggaaaaccaaaatcacatttgaggaagacaaagtcgactcagctctcattggctcatcctctcatgttgaatgggaggatgctgtacacattattccaggtagcctctgttttccttgtgtctcatacctctctctaggctgaggaagataaactctgaagacaggctctataaacacaaattcatttgaataaaaaactgtgatgggtttctaaacagatatcagggagtttttttgtccttcacagctaatgtcatgactttgtctgccagtccccagtatcaagttactcaaccccaggcaagtgtgacaatctcatagtcacctgagtgcaggaggtgcacaggcagtatctgtcaggcctcctagcttcgattcagtatctcttgtcatctgtgattaagtcatctgtccctgaacaatgtccatggagtttctatgcctgtttaaggaagctggcagccttgcctttgtatttggaattattgttccccaggcttcactgctctcagctttcatctggatctcctttaagtcagcttgcttagctgcacagtcaccctgaaatcagtacggaaacttttcttctttactttgctgatatatttccataaagcaaggctggaccctggttctccaccctgtcaatgcaatggctgatccaatgtttctttgtagcatcgtggatttttttttttttttttttttttttttttttttttgcgatggagtcttgctctgtcacccaggctggagtgcagtggcaccatcttggcttggtgcaacgtctgcctcccagattcaagtgattctcctgcctcagcctcctgagttgctgggaccacaggtgcacaacatcacatctggctaatttttgtatttttagtagagacagggtttccccatgttggccagggtagtcctgaactcatgacctcaaatgattcacctgtcttggcctcccaaatcacagattctttttaaagcaagagttgttcaaatttatctatcagtcgtgtttcatgtatagatgcctctaaacatttaatgtccatgttacctggtgatataagtccatatcgcagcaacactcttagaaaattgttttaccaatttttggagatttttttggggaaaaaattttgtttaactttgactcaagcagggaatatggcattatggtctacatgtagagggagattttggcctgtgggtctggaaagcagggtcatctaattctcaccaaagttaatctaggacaacctagaatattcctgtcagaatccttattcttgcactgagaatagttatgtccttgtgctatgattggacagtgatttgttcatatgtgaagtatgaattgcttaatgtgacctgcttctctgaatttatttacagaaaatgaaagtgatgatgaggaagaggaagaaaaagggccagtgtctcccaggtaatgttgtggaattgttggctgttaattcagtagtgacatctggagattgtagatttagggaaaatgaggaagtgatgaatagaactatttcttccattcacccagctacaaattgtgctgatttacaatgttgtatgttatttgtggcacttgtattggttttaatttcatagtcctctcaagataggaacttgccatcagatgagccaggtgaactagccaaacagggttttcttgttgatcttttcaaaaaaccagccctggattcattgattttttgaagggttttttgtgtctctatctcctttagttctgctctgatcttagttacttcttgtcttctgctagcttttgaatttgtttgctttgcttctctcgttattttaattgtgatgttagggtgtcaattttagatcttttctgctttctcttgtgggcatttagtgctataattttccctctacacattgctttaaatgtgtcccagagattctggtatgttgtgtcttttttctcattggtttcaaagaacatctttatttctgccttcattttgttattttcccagtagtcattcaggagcaggttgttcagtttccatgtagttgtgcggttttgagtgagtttcttaatcctgagttctaatttgatggcactgtggtctgacagttcgttgtgatttccattcttttacatttgctgacgagtgctttacctccaactatgtggtcaattttggaataagtgtgatgtggtgctgagaagaatgtatattctgttgatttggggtggagggttctgtagatgtcttttaggtctgcttggtggagagctgagttcaagtcctggatatccttgttaagcttctgtctcattgatctgtctaatattgacactggggtgttaaagtctcccattatgattgtgtggagtctaaatctctttgtaggtctctcaggacttgctttatgaatctgggtgctcctgtatagggtgcatatatatttaggatagttaactcttcttgttgaattgatccctttaccattatgtagtggccttctttgtctcttttgatctttgttggttgaaagtctgttttatcagagactaggattgcaacccctgcctttttttgttttccatttgcttggtagatcttcctccatccctttattttgagcctatgtgtgtctctgcatgtgagatgggtttcctgagtacagcacactgatgggtcttgactctttatccaatttgccattctgtgttttttaactggggcatttagcccatttacatttaaggttaatattgttatgtgtgaatctgatcctgtcgttatgatgttagctggttatttcgcccgttagttgatgcaatttcttcctagcgtcaatggtctttacagtttggcatgtttttgcagtggctggtaccggttgttcctttccatgtttagtgcttcctttaggagctcttgtaaggcaggcctggtggtgacaaaatctctcagcatttgcttctctgtaaaggatttatttctccttcacttatgaagctttgtttggctggatatgaaattcttggttgaaaattcttttctttaagaatgttgaagatgctggagaggatgtggagaaataggaacacttttacactgttggtgggactgtaaactagttcaacgattgtggaaggcagtgtggcaattcctcagggatctagaactagaaataccatttgacccagccatcccattactgggtgtatacccaaaggattataaatcatgctgctgtaaagacacatgcacacatatgtttattgcggcactattcacaatagcaaagacttggaaccaagccaaatatccagcaatgatagactggattaagaaaatgtggcacatatacaccatggaatactatgcagctataaaaaatgatgagttcatgtcctttgtagcggcatggatgaagctggaaaccatcattctcagcaaactattgcaaggacaaaaaaccaaataccgcatgttcttactcacaggtgggaattgaacaatgagaacacatggacacagaaaggggaacatcacacactggggcctgttgtagggtggggggagggaggaggggtagcattaggagatatacctaatgttaaatgatgagttaatgggtgaagcacaccaatgtggacatgtatacatatgtaactaacctgcacgttgtgcacatgtaccctaagacttaaagtattaaaaaaatatatatatatatatatatacatacacacaaaaaataataaaggaaaactatacatatggaaaaaaaaaagaatgttgaatattgctcccactctcttctggcttgtagggtttgtgccaagagatctgctgctagtctgatgggtttccctttgtgggtaatccgacctttctctctggctgcccttagcattttttccttcatttcaaccttggtgaatctgacaattacgtgttttggggttgctcttctcgaggagtatctttatggtgttctctgtgtttcctgaatttgaatgttggccttccttgctaggttggggaagtcctcctggataatatcctgaagaatgtttcccagcttggttccattctccccgtcactttcagtacaccaatcaaacgtagatttggtctttccacatagtcccatatttattggaggcttgttcatttctttttactcttttttctctaaacttctcttctcgcttcatttcactaatttgatcttgaatcactgataccgtttcttgcacttgatcgaattggctactgaagcttgtgcatgcatcacatagttctcgtgccatggttttcagctccatcaggtcatttaaggtcttctctacactgttcattctggttagccattcgtctaatcttttttcaaggtttttagcttccttgcgatgagttcgcacatcctcctttagctcagagaagtttgttattaccgactttctgaagcctacttctgtcagctcatcaaagtcattctccatcctgctttgttccattgctggcgaggagctgcgatcctttggaggagaagggatgtcaggtttttggaattttcagcttttgtgctctggtttctccccacctttgtggttttatctacccttggtctttgatgatggcgacctacagatggggttttggggtggatgtcttttttgttgatgttgatgctattcctttctgtgtgttagttttccttctaacagtcaggtccctcagcttcaggtctgttggagtttgctggaagtccactccagaccctcaaacagggatttcttggtgttgcctattctctcccatgtgtttaaatccagggagaggtgtatatatgctttcttcctatttgttggtagtatgttggctagtatttttgcaagaaaagaaattgaaaaagtaaatatattatatcaaaatattgggaaaatggggcccttaatacacaagatctgtgtctgcactgcgtcaagaactctcttcacttgaatgctgcatgtaaaattcaacccaatttatgcaaagtagttgaagccctgtgtcagttctctgtgctgcaagtcatgatggtagtttacagggagagtctgggtgccctgagttggctcatctgtggcaaatgtactgagcacatgctgcccatttttgctctgtccccagagcagtcaccctccaccctgtatttagaaggatagttttatttctcttgaaggaaaaatgcctttggtttctgtgaccactccattctgtctcccatcagatcatctgggaggttttgttgtctaatgtctgttggttaaatgttctatcatccgtgtcctgcctggctcatcaggaatctgcaggagtctgaagaggaggaagtcccccaggagtcctgggatgaaggttattcgactctctcaattcctcctgaaatgttggcctcgtacaagtcttacagcagcacatttcactcattagaggaacagcaagtctgcatggctgttgacataggcagtgagtactccattgtgaaggtgataaagctccagttcatggcccaggtagaccccataatctttgggccttgtgccccttgttgggctgagatttgccatcactgtgggctgaacctatatatcaatgtagatttcaatcactctggagtcgagtctgaagcacaggcatggggtgggtcagtgagctttgctctcttcctagtctcacgccatgcccgtgccaacctggactgactgtcacgatattgaactcaaggcaggtgtggcaaactcacaccaaactatgcagcacatgccc

SEQ ID NO: 921 - DNA, 7109 bp, Homo sapiens
tgaatatgagcacagacttggggatattagtgtcacctagcgttattagctagtattctccttttgtttccccataacatcccctcctccttcccacagatccactttccactcatttccatcctgtcttacgccacttggggcttgtcccttctagaatgcatccctggctcccctgtgtgcacacttctagttaggtttagcaatgtgggcacccgatggagcctggaagtgagaggaaggtgaggtccgtatttcttccctctccctccctgctctggcactgagtatctgacaatagctgcatctgtctattacttcagtggccactcttccacagccccaattctcagtgggtcccatagcattatttacctttgttcctttagctcccaccaaggaagacccagaggcattctcctcaccaaggcattaagaaatgcatgggtgaggggaacagcggcgtgcatgtaaaggtcctgtggcgcctctcctctacaggctggaggtcatggcgggagatgctgcatggatttgccctccctgctgtcagaacaacagggttctggaagagtagaggacaggccgtgggacttggctgtctagagacaaggcgggagggatttccttgagaggcagggacatgtggtggttactaatcattgtgaggtgtctgggatgtaatggatgggaaatctactaagaagtcaacttatgtaataattagaaaagctctagttctgaggacagagacctgttggagtcaccatagtggaaatttatgacctggtatccagttcagatacctggagcttcttgactggggggagattggatcccttggggaagagtgaagccttcaatgctgccacaagtgtgatccgcccgcctcagcctcccaaagtgctgggattacaggcgtgagccaccatgcccggcctcttttttatatttaaaaaatatcattttatatattaccagggcaaaagagaaaactcgtatgattacgtggtcatacacagtaaaagcatttggcaaaattgaaaacttttttcatgatttataaaaacaaaccccagaaaatgctcagcatgatgagaacagaaggcaacacttccaaccccattaagggcagatttgaagaacccacaggtaacattatattaaatggcataagattgaatgcttttctattaaatcagagaaaaaagtagaatacctgctgttactcttttaattcagcattatactagagctctaagtcaatgcaataaagtaagaaaaattaataaagtattgaaaagaaagaattgaagctgtctttattcacagataatgactgtgtttgttaacaatgctagaaatctacaaaaatctaccagaactaatcagtgagtttggtagtgttgcagaatgtaagctctcaatgtaagtggtcttttgtatttctgtatattagcaatgagcatttggaaaatgaaataagaatacaatttcatttaaagtaacatctaaatacatgttgtgcttataaataaattcaacagactgggcaccatggctcacacttgtaatctcagcactttgggaagccgaggtgggcagatcatgaggtcaggagatggagaccatcatgcctaacacagtgaaaccccatctctactaaaaatacaaaaaattagctaggcgtggtggcatgtgcctgtagtccagctacttgggaggctgaggcaggaggatcacttgaacctgggaggcagaggttacagtgagccgagatcgcatcactgcactccagcctgggtaacagagcaagactctgtctcaaaaaaaaaaaaaaaaaaaaaaaaaaaaaaaaaaaaaaaaaaaggaaagtcaacaaaatttatgtaaggccagtacaccaaaaactacaaaaaattgctttgagaaattatgaaagaactaaattagtggggagataaaccttgtcatggatcagaagagttgttatgtttaaagagtcagttcttcgtaaattgatctccagatccaatgcaattctaataaaaattccaagtggcattttggtagaaattttcaagctgattctaccatttatatggtaatgtcaatgatcaagaataataaaatagcaatattataaaagaataatggtgaatgaattcactacctatttccagaattactctacagctatgaaaatcaagattatgtgttttgttgaaaaaaaaaaatagaatatatatcagtggaagagaagagagaatccagaaatagatactcacatgtatgtctaattgattcttaggacatatatatatgtatacacacccccccacacacacacacaaacatgtgtgtgtgtgtgtgtgtgtatatatatatatatattcaccgttttgaagattatcatctccaaatagggaatatatatatatatatatacacacacacacatatatatattgcagtctgataagataaacagcacaatgaaacaatttctcaaaagacttgaatagatacttcagaaaagaagatacatgaatggtcaattagcataggaaaagatgctccactgtttagtcatcagggagatcaatcagtgcaacaatgagataccagtacatatccataagaatggctaaaattaaaaaggctgaaaatagcacatgttggtgaggatataaagcacttggaagtcttatacttgtaggaatgaaaaatggtattgctcctttgaaaatctaacagtttcttaaaggttaaacataacacaaatcagatagacagtcattccattcctaggaatttacacactgtgtctgcacaatgatctgtatgtgtgtttccagaccaacctgaggggcgggctgctatttctcgtggctcagtaacgagacacagatgaactggggaggaagagagttttgacttctgcaactggttacagggaaacggcctggaaattatcaccagaccaactcaaaattggaaagttttcctgagctaatgtaccttctaagctatatgtgtatgtggaagtgtgcattcatctaaatacataagtgattaacttcttttaatctataactaagtctgagtcctaaagaccttcctctggaacctcagttaaattcacttaatctaaatgggtctaggtgctgggggcccttatcttgtctcctgctaaatcacagaggtttggagagtcccttcagatctccaataaacttgtctgtggaggcctggggagtttcttcagacccccagtaaaactcgtttaatactaaatggctcctgttaagaatgccttcgttatttcgtcatgctttaaggcccaggaaaaacctaggcaaaactcttggtgggcttttgttacattccagcctttgtataagggcactggcttcttttttttttttttttcctcttaatatttaattgaaccactcagtcgctactgaaacagtttttagggaggcctgtgttagtgagacctggcctgctacgtatggatgctcatgatagtttcttcataatagcccaaacgtggaatgatagaaatgtccaataataagtgaaagtacaaacatacatggtatagccacatgaaggaatactactcagtatttacaagacattacagatggattttaaaattacattgatgcatgaaagaaggcagacacaaaagaacacaggtatcatttcatttatagaaaatggttaaaaatgcaaacggacctgaagtgacagtggctccttggggctgagggttgaaaggctgatgaactgcaaaggggtacaagaaacttttgggcatagggaatttcctctatcttggttgtggcagtagttccgttagtgcatccatttgtaaacgtgcattgaattacacattttaaagtggtgcagtctgttgtaccgaaattatgcctttataaagttgatttcatcatcttaatttctccatactagcaattagcagctagaaaatgaaattcaataaaacataatagagattaatagccagaatcattacatgcttaacaatacatgcaatgaagcaggtacgaggcccctaaaagcaattggtgagaaaaattaaagaaggctaaataaatatatatcatgttcattgattggaagactcaattttgttagcatattacatcaacacaattctgattaatatttctagtaggagattttagagaaatttgaaagctagtttcaaaatgtatttgaaaatcaaagaacctagaataagcaagtcggtcttgaagaagcaataagttggaggacttgctctgctagatttcaaacctgattttaaagctacagtaatttaaaaacagtagtaatggtgtaagtattcataaatatatcaaagcaaaagaatacagattcaaacaatatgcccacatatgtacagttattgattttttttagtagaatcttttttattcataaaaaatccatcaaaacaaaaaagttttccagccacacacaggaggggtatgggtgggggaaggtgtctgtccatctatccctggcccccagcccatgtggttttggcagcaataaggtgtgtggggtaatgactcctgaaattaaaatggtgtgtgtatgtgaaggaaaggcgggcaaagctgtggggagcggtggagtggaaggaacaaaggaggtcagtactgggaacgctgaaggtgggaggccatttcataacattacttgttgatgaaattgccatggataccttctttgcccatcagcaggcctagcgtcttggcagtcatggtgacaatgacgttgaaggtgggggctccaccgatgctcttcatacaaagatccgtggtcaattccccatcctgcagcagtgagtccaggaccacagtatatttctggccccccagtgtcagcccattcatgacaaagcttgaccagtctttgccaaccaggacaccaacctcagctggcgtgatgttgaggaaggttttccctgggacggtggcacagatggaaggtgggtccttgttgcccacaatggccgtgtcctaacaggtcccgtccgccacgaggctgtagatggaggtgtccacctggcctttgcgttgctgcaggggctcctctggtcgctgctgctggggccgcctgggctggcgggttggggaggcggagagctcgatgcaggtgctgtcctcctcgccacgactctgctagctgtgcagtagccctcgctccgccacttaaaaaagaaaaaatatatatataatatatatatacacgtgttatatatattgtatattatgtatatacacgtattatatatatacacgtatgtatatacacgtatatataatatatattcgtgtgtgtatatatattttatatatacgtgtatacatgtatatatgtgtatatatatataatatatatacatgtgtatatataaataatacatatacacgtgtatatatattatatatatatatacacgtgtgccatgttggtttgctgcacccattaactcgtcatttacaccaggtatatatcctaatgctatccctcccccagccctcaccccatgacaggccctggtgtgtgatgttccccgccctgtgtccaagtgttctcattgttcaattcccacccatgagtgagaacatgctcgcaccgccgcttctaaatgttttaaaaacaaagacaccaatgcccttcattggggaaatgaaagacttttaagtaaaacgattttgagtgaaataatatttgttgttttaaaaagttaatattaaccactctccatcatatattgaaattaacttaagatgtgaaagttaaaattagaaaccttgtaaaggaaaaataggaaatagtttcatgaacttgacacaggaaaatatttcttagactagatactgtagcactcaccacaataagaaatcaagcgaattgcacttcatttttaaaaagcttctccttattatgttgttgtttaacaacttaaacgctatctctagaccaggaataattatttgctatataatacagcaaaaaatatgtatgtataaatggactcattcaaaatatataaagaactcctattacaaagaaattgacaaacagcccagtatatcaatgaatataaaaatttgagaagatattttccataagaagatatctaaatgaacattaggcatgagaaaaccaaattttaggatatcactacacacctggcatagtttaaaagactgaaaatattaagtgtgtgggaatgtagagcaactggaaatggcctacatctttcatagaaatgtaaaacaatacaaatactttgcaaaactctgtccaacattttctacccattcaccaagcaactccatccctagctatagatacccaggaaaataagtatgtatcttcacagaaataattgtatgagaatattcatagttacttatgcacagtagttatcaagtaaacctgtctcccatcagaaaaatggatataaaattgtgtgataatcatacaatcaataggatattacttggccaaaacaaaatgaaacaagggaaaaacacaatcaaacaaattagtggcatatatacccacctgagtaaagagaagtcggccgtgtgcggtggctcacgcctgtaatcccagcactttgggaggccgaggcggcagatcacgaggtcaggagatcgagaccatcctggctaacacagtgaaaccccgtctctactaaaaatacaaaaaaaaaaaaaagaaaaattagccgggcgtggtggcgggcgcctgtattcccagctacttgggagtctgaggcaggagaatagcgtgaacctgggaggcagagcttgcagtgagcctagatcgcgtcactgcactccagcctgggcgacagagtgagactctgtctcaaaaaaaaaaaaaaaaaaaagtcaaaacaagagaacatactaaatgattccatttttttatttatgacttcatgactaccattaagaaaatataacctgttgggaaactgtttctgccttgatgatgttgtacagacaagagataaacagtgaggaatatgcttagatgtattggga

SEQ ID NO: 922 - DNA, 1310 bp, Homo sapiens
cacgtgtatatatattatatatatatacgtgtgccatgttggtttgctgcacccattaactcgtcatttacattaggtatttctcctaatgctatccctcccccagccctcaccccatgacaggccctggtgtgtgatgttccccgtcctgtgtccaagtgttctcattgttcatttcccacccatgagtgagaacatgctcgcaccgccgcttctaaatgttttaaaaacaaagacaccaatgcccttcattggggaaatgaaagacttttaagtaaaacgattttgagtgaaataatatttgttgttttaaaaagttaatattaaccactctccatcatatgttgaaattatcttaagatgtgaaagttaaaattagaaaccttgtaaaggaaaaataggaaatagtttcatgaacttgacacaggaaaatatttcttagactagatactgtagcactcaccacaataagaaatcaagcgaattgcacttcatttttaaaaagcttctccttattatgttgttgtttaacaacttaaacgctatctctagaccaggaataattatttgctatatattacagcaaaaaatatgtatgtataaatggactcattcaaaatatataaagaactcctattacaaagaaattgacaaacagcccagtatatcaatgaatataaaaatttgagaagatattttccataagaagatatctaaatgaacattaggcatgagaaaaccaaattttaggatatcactacacacctggcatagtttaaaagactgaaaatattaagtgtgtgggaatgtagagcaactggaaatggcctacatctttcatagaaatgtaaaacaatacaaatactttgcaaaactctgtccaacattttctacccattcaccaagcaactccatccctagctatagatacccaggaaaataagtatgtatcttcacagaaataattgtatgagaatattcatagttacttatgcacagtagttatcaagtaaacctgtctcccatcagaaaaatggatatcaaattgtgtgataatcatacaatcaataggatattacttggccaaaacaaaatgaaacaagggaaaaacacaatcaaacaaattagtggcatatatacccacctgagtaaagagaagtcggccgggcgcggtggctcacgcctgtaatcccagcactttgggaggctgaggcggcagatcacgaggtcaggagatcgagaccatcgtggctaacacagtgaaaccccgtctctactaaaaatacaaaaaaaaaaaaaaaaaaaaaaaa

SEQ ID NO: 923 - DNA, 2152 bp, Homo sapiens
gaccttcctctggaacctcagttaaattcacttaatctaagtgggtctaggtgctgggggcccttatcttgtctcctgctaaatcacagaggtttggagagtcccttcagatctccaataaacttgtttgtggaggcctggggagtttcttcagacccccagtaaaactcgtttaatactaaatggctcctgttaagaatgccttcgttatttcgtcatgctttaaggcccaggaaaaacctaggcaaaactcttggtgggcttttgttacattccagcctttgtataagggcactggcttctttttttttttcctcttaatatttaattgaaccactcagtcgctactgaaacagttgttagggaggcctgtgttagtgagacctggcctgctacgtatggatgctcatgatagtttcttcataatagcccaaacgcggaatgatagaaatgtccaataataagtgaaagtacaaacatacatggtatagccacatgaaggaatactactcagtctttacaagacattacagatggattttaaaattacattgatgcatgaaagaaggcagacacaaaagaacacaggtatcatttcatttgtagaaaatggttaaaaatgcaaacggacctgaagtgacagtggctccttggggctgagggttgaaaggctgatgaactgcaaaggggtacaagaaactttggggcatagggaatttcctctatcttggttgtggcagtagttccgttagtgcatccatttgtaaacgtgcattgaattacacttttaaagtggtgcagtctgttgtaccgaaattatgcctttataaagttgatttcatcatcttaatttctccatactagcaattagcagctagaaaatgaaattcaataaaacataatagagattaatagccagaatcattacatgcttaacaacacatgcaatgaagcaggtacgaggcccctaaaagcaattggtgagaaaaattaaagaaggctaaataaatatatatcatgttcattgattggaagactcaattttgttagcatattacatcaacacaattctgattaatatttctagtaggagattttagagaaatttgaaagctagtttcaaaatgtatttgaaaatcaaagaacctagaataagcaagtcggtcttgaagaagcaataagttggaggacttgctctgctagatttcaaacctgattttaaagctacagtaatttaaaaacagtagtaatggtgtaagtattcataaatatatcaaagtaaaagaatacagattcaaacaatatgcccacatatgtacagttattgattttttttagtagaatcttttttattcataaaaaatccatcaaaacaaaaaagttttccagccacacacaggaggggtatgggtgggggaaggtgtctgtccatctatccctggcccccagcccatgtggttttggcagcaataaggtgtgtggggtaatgactcctgaaattaaaatggtgtgtgtatgtgaaggaaaggcgggcaaagctgtggggagcggtggagtggaaggaacaaaggaggtcagtactgggaacgctgaaggtgggaggccatttcataacattacttgttgatgaaattgccatggataccttctttgcccatcagcaggcctagcgtcttggcagtcatggtgacaatgacgttgaaggtgggggctccactgatgctcttcatacaaagatccgtggtcaattccccatcctgcagcagtgagtccaggaccacagtatatttctggccccccagtgtcagcccattcatgacaaagcttgaccagtctttgccaaccagggcaccaacctcagctggcgtgatgttgaggaaggttttccctgggacggtggcacagatggaaggtgggtccttgttgcccacaatggccgtgtcctaacaggtcccgtccgccacgaggctgtagatggaggtgtccacctggcctttgcgttgctgcaggggctcctctggtcgctgctgctggggccgcctgggctggcaggtgggggaggcggagagctcgatgcaggtgctgtcctcctcgccacgactctgctagctgtgcagtagccctcgctccgccacttaaaaaagaaaaaaaa

SEQ ID NO: 924 - DNA, 164 bp, Homo sapiens
ccacctgagtaaagagaagtcggccgggcgcggtggctcacgcctgtaatcccagtactttgggaggccgaggcggcagatcacgaggtcaggagatcgagaccatcgtggctaacacagtgaaaccccgtctctactaaaaatacaaaaaaaaaaaaaaaaaa

SEQ ID NO: 925 - DNA, 292 bp, Homo sapiens
caccaacctcagctggcgtgatgttgaggaaggttttccctgggacggcggcccagatggaaggtgggtccttgttgcccacaatggccgtgtcctaacaggtcccgtccgccacgaggctgtagatggaggtgtccacctggccgttgcgttgctgcaggggctcttctggtcactgctgctggggccgcctgggctggcgggtgggggaggcggagagctcgatgcaggtgctgtcctcctcgccacgactctgctagctgtgcagtagccctcgctccgccacttaaaa

SEQ ID NO: 926 - DNA, 374 bp, Homo sapiens
agtatttagcaactttccatgtttgcaatcaggtgggggtgggactagagttaaactgccatttattgatttctgacacaggcacagaatgacctgttttctccaagaggctcaatcgtgttttcaagaatcctctctaccatataagatcctgcagacaaataacatctagtctgttgttctaaatgtctgagactagtgaacttttattcagttcaagtttctgttgaggcccaacaggcaaagctctgttctagtgactctgagggaaacttggtgatagtagccagtacctgctctgaggggcttcaagaggagtctactcctaatagaacctgtgctgtctataaatgacagcatcaagagcagggagt

SEQ ID NO: 927 - DNA, 1407 bp, Homo sapiens
attgtcacaagggtacacgaatactgagagtgaatgctgaaggaatgatccccattggtggtgaccctcaggtgagactagggtgcctgtgtttagcaaagcctgggcaattggaatgcagggctcctaagattccatgacacccctaccttctaattctgttattgcaactgcagacggttacctggcacgctggccacaatctacctcactcttatcagagtctgagcagtgctttcagctctgagttgaggcacctcgaaccttgtttttgtggtgaaggatcctaaagtgctgtggggagtgatcacatttttcacaacagtaagttaagaatttcagttactgacatccctcagtcctgattaaacctatttgatttcaccagtttttaacccatcatatgtttgggtttcttctccccagtccctgactccacctcttctgccacaaacgtcagcatggtggtatcagccggcccttggtccagcgagaaggcagagatgaacattctagaaatcaacgagaaattgcgcccccagttggcagagaacaaacagcagttcagaaacctcaaagagagatgttttctaactcaactggccggcttcctggccaaccgacagaagaaatacagtaagatctataggctcaccatcatgaaagtgatgaatgatgtcctgtcttctctctgagacactaaatgctctctccatcaaaaataatttcatccttcctgtacttctaggaaaacagaaatgggtattttaacattttgttaaagttggaagacagaggtaccaaagtatttagcaactttccatgtttgcagtcagatgggagtgggactagagttaaactcacagttactgatttctgacacaggcacagaatgacctgttttctccaagaggctcaatcgtgttttcaagaatcctctctgtaccatataagatcctgcagacaaataacatctagtctgttgttctaaatgtctaggactagtgaacttttattcagttcaagtttctgttgaggcccaacaggcaaagctctgttctagtgactctgaggggaacttggtgatagtacccagtacctgctctgaggggcttcaagaggagtctgctcctaatagaacctgtgctatctataagtgacagcatcaagagcagggagtaggggccgtgcagcatggctcactcctgtaatctcagcactttgggaggctgaggcgggcagagcacgaggtcagcagtttgagactagcctgggcaacatggagaaaccccatctccactaaaaatacaaaaagtagatgggcgtcgtggcgggcaactgtaatcaccactaatcgggtggctgaggcagaagaagcctttgaacccagcaggcaggtgttgcagt

SEQ ID NO: 928 - DNA, 1146 bp, Homo sapiens
cgaatactgagagtgaatgctgaaggaatgatccccattggtggtgaccctcaggtgagactagggtgcctgtgtttcagcaaagcctgggcaattggaatgcagggctcctaagattccatgacacccccaccttctaattctgttattgcaactgcagacggttacctggcacgctggccacaatctacctcactcttatcagagtctgagctactggcagtgctttcagctctgagttgaggcaccttgaaccttgtttttgtggtgaaggatcctaaagtgctgtggggagtgatcacatttttcacaacagtaaggtaagaatttcagttactgacatccctcagtcctgattaaacctatttgatttcaccagtttttaacccatcatatgtttgggtttcttctccccagtccctgactccacctcttctgccacaaacgtcagcatggtggtatcagccggcccttggtccagcgagaaggcagagatgaacattctagaaatcaacgagaaattgcgcccccagttggcagagaacaaacagcagttcggaaacctcaaagagagatgttttgtaactcaactggccggcttcctggccaaccagcagaagaaatacagtaagatctataggctcaccatcatgaaagtgatgaatgatgtcctgtcttctgagacactaaatgctctctccatcaaaaataatttcatccttcttgtacttgtaggaaaacagaaatgggtattttaacattttgttagttggaagacagaggtaccaaagtatttagcaactttccatgtttgcaatcagatgggggtgggactagagttaaactgccatttattgatttctaacacaggcacagaacgacctgttttctccaagaggctcaatcatgttttcaagaatcctctctgtaccatataagatcctgcagacaaataacatgtagtctgttgttctaaatgtctaggactagtgaacttttattcagttcaagtttctgttgaggcccaacaggcaaagctgtgttctagtgactctgagggaaacttggtgatagtagccagtacctgctctgaggggcttcaagaggagtctgctcctaatagaacctgtgctatctataagtgac

SEQ ID NO: 929 - DNA, 9098 bp, Homo sapiens
attgtcacaagggtacacgaatactgagagtgaatgctgaaggaatgatccccattggtggtgaccctcaggtgagactagggtgcctgtgtttcagcaaagcctgggcaattggaatgcagggctcctaagattccatgacacccctaccttctaattctgttattgcaactgcagacggttacctggcacgctggccacaatctacctcactcttatcagagtctgagcagtgctttcagctgtgagttgaggcacctcgaaccttgtttttgtggtgaaggatcctaaagtgctgtggggagtgatcacatttttcacaacagtaagttaagaattttagttactgacatccctcagtcctgattaaacctatttgatttcaccagtttttaacccatcatatgtttgggttttttctccccagtccctgactccacctcttctgccacaaacgtcagcatggtggtatcagccggcccttggtccatcgagaaggcagagatgaacattctagaaatcaacgagaaattgcgcccccagttggcagagaacaaacagcagttcagaaacctcaaaggagatgttttctaactcaactggccggcttcctggccaaccgacagaagaaatacagtaagatctataggctcaccatcatgaaagtgatgaatgtgagacactaaatgctctctccatcaaaaataatttcatccttcctgtacttctaggaaaacagaaatgggtattttaacattttgttaaagttggaagacagaggtaccaaagtatttagcaactttccatgtttgcaatcagatgggggtgggactagagttaaactcacagttattgatttctaacacaggcacagaacgacctgttttctccaagaggctcaatcatgttttcaagaatcctctctgtaccatataagatcctgcagacaaataacatctagtctgttgttctaaatgtctaggactagtgaacttttattcagttcaagtttctgttgaggcccaacaggcaaagctctgttctagtgactctgaggggaacttggtgatagtacccagtacctgctctgaggggcttcaagaggagtctgctcctaatagaacctgtgctatctataagtgacagcatcaagagcagggagtaggggccgtgcaacgtggctcactcctgtaatctcagcactttgggaggctgaggcgggcagaggacgaggtcagcagtttgagactagcctgggcaacatggagaaaccccgtctccactaaaaatacaaaaagtagatgggcgtcgtggcgggcaactgtaatcaccactaatcgggaggctgaggcaggagaatcctttgaacccagcaggcagatgttgcagtgagtcaagattgcactattgcactccagcatgggtgacagggcaagactcgtcaaaaaacaaacaaacaaaaagataaataaatcaaaaataaaaataaaaagcagagagtaccttggtgagagtgaagtctgcttcctggtgcacaggctcttgttcctaaagaggaagaaagatcacacccgagaacgtgtggaagcagcagtgcagtgtgcaaagcagggaccctcagcctgtctcctgggctccatccatgttgcttgtcttgtctgtccctcagtttcctcatctgttcagagggtactacaataatgcctacctctgtaaattgctgcaatgaattacatgaggtatttcctgtcgatctccttgaacattaattggcacagtgtaaacactatctattagttcttcattctgatgtttctaaattaacacaaactaatcttatgctgtttctaaattaacacaactaatctaaatcttaatgctgcctctcatactaataaagtatttgggcatattttcttcatggccttattgtcttatgtctcacactttaggcttcagatatgattcttaaaaccatatctgaatattgatttaaaaatgaaatatttttaaagttcttgacatatttgtccttgaaatacccagtaaaagggaaaccatcagtcccatagtcctaggggccttcctgactgtacaagaaatcactacttcatgccccagtgcagtgttttagaggagaggctgcaaggcttgggaaagtggccccgcattcagagtcagacctcaggggctgtgagttctgactccacttcgttgtggttgaatcatcttgtcaacttccttgatgcgcccttgagtttctctttcttcgtctttaaattttggaggatcagatgccagaaagtcagaagactgaagagtaaagatgtggaaatccctgtctagaccctggtactggggagagttttgtccttgggatggacctggctcctgccctgtaggcagtgaccacagcagcatgtccagccttccactgaggcaggcgtgtctgtcttttctcagagtatgaagagtgtaaagacctcataaaatttatgctgaggaatgagcgacagttcaaggaggagaagcttgcagagcagctcaagcaagctgaggagctcaggtgaggggaccccgtagggggagacaggcaggtaggtgtgtagatctctgaagtacagcagctcggcggggagaagtaagaacgaagctgggccaggggaagggcagaaattgccatggcaggctcatgacacacaaatatttatcagagaacaaggataataataagttctgtgttgcagttgtttcttagagccttgttttctctttttcaaacaagtaattgttgaggtgaaacttacataacacaaaattcaccaaaggagtgggaaccacccagcagcattcagtataatcaaaatggtgtgctattgccaccccacttacccttagtgagaatcacctcctgactgactgcgtcttctcattctttcactcaatcaatgttgccttctcgaccctgtcattcttttcttctttcgtcttttcaattcgccccatctgcacctggcctcatttctgtacatggctttgtatctagtggccgcaagatgcactatgtgtattttcacatggaaatgtccatggccagagtgaggaactgaaaggatgtctttttgaaacggaattaggaagacacctacttttatttacagaagggaaagatgaatggaacatcatcgaggatcttgcaggagccctctctgatagagggaaagcctgtagaccattttctgttctttctcttggccacagacattcctttcaacatgtgctgaccttctgcttgaaggtctccttgagaacattgtctcagaaatctctgttgcaatatttgaacggatcactcaatgcttttcactgttaaattttctctaccgtctcaccttaggcaatataaagtcctggttcactctcaggaacgagagctgacccagttaagggagaagttacgggaagggagagatgcctcccgctcattgaatgagcatctccaggccctcctcactccggatgagccggacaagtcccaggggcaggacctccaagaacagctggctgaggggtgtagactggcacagcaccttgtccaaaagctcagcccaggtaaggtggccataggccctgatgacccaaaaccccaggcttatgagaggctccagacctccatactttcacaatgacagttgtatcagtggggtttttttctactacacatatgtggccatgacatgatcaggacttcctgagtaagaacagaaatgggaaacccatcggtttggaggtcacagtattgcaagtgtccctccttccttgatggaaggtggtctttggagcaagaggcagcatctatctagttttaaaggacaggaaggaggctgtgatgggagggcgcttgttggagtgaaaagagctctgggctaagaatgaaggttcccaggctgtctttttggcaatgttcttagtaagtgtcggtgagtgagtgatttatctttccagagtttctctctctccatctgcaaaggcagacaaattgtctcttgcaagggtctgaagcatccaaatatgggaacacttacgaatgcttttcaaaatgagatgaagcccctctccgtgtggtgttggagaaggcacttgatgtgggggcatttggtggtaggaagtgcttcagactggagcactccccatggatagaatgtccctgaataacacagcagaagccacatggagggcctgtgcagtctcatgacgcatagaggactgtgggacaagtttgtcctctcctaagagaatgaatgaggtttgaaatgcgaactgtgacaggacaccaagcctgttcctgggaatcagatctgtggcaggatgggggagacagctgccaaagtccagagagaggctgcacaagcctccagtgatatgggaagcaaaaggtcttttcagtatttggccacatcttgatggtggccctccacatcagaaatgcattgcctgatggaccaggaaaccatgccagggcattttgtgaaggataaaacatgagagttttcagtacaatgctgaaccatacatagatattcatgtctctgtgcacgttgggctgactgtgcttgcagaatgtgaagtgggaaatatctgaacgaacattttgtatttatagaaaatgacgaagatgaggatgaagatgttcaagttgaggaggatgagaaagtactggaatcatctgcccccaggtaacattgaatactcaggagcaagtaatgggtggtaacatatgaaaatgtctaggaggcacgccctctctggcatctatgatgggccaaaagcccgcattcccttggccacagtatgtgaaattcaacccagcttagacacagggtgcggcagctgttgtgtttctctatgtgtgccaagtgtcatgtctgtaccatacagggatagctgagtcttcatcctcttcagctcctatctgtccagtgcactgaacaccagctgctctcttcctctctggctcccatggcagcgaagctctgttgcagagagaagaggattgcctgttccctcttaaagggaacctccatttgttttctgggaccactctcttaatgccgcttgtcaaaaccagctaggactccttggggtccaatccctctgtgtttaatcttctgtcatctctgtcccacctggctcatcagggaggtgcagaaggctgaagagagcaaagtccctgaggactcactggaggaatgtgccatcacttgttcaaatagccacggcccttgtgactccatccagcctcacaagaacatcaaaatcacatttgaggaagacaaagtcaactcatctctggttgtagacagagaatcctctcatgatggatgtcaggatgctctaaacattctcccaggtagcctctattttccttgtgtctcatacctctgtctaggctatggaagatcaattctgaggacaggctgtatatacacatattgttattgttttagtcagaaactaggatggagctaggtgctgtgactcacacatataatcacagcactttggaaggcccaagtgggaggatgacttgagttcaggagttgaagaccagcctggagtatatggtgaaacccatctttacgaagaatacaaaaaattaggcaggcatggtgctgcccgcctatagtcccaactgctcaggagacttaggtgggaggatgggctgagatgatcctcccaccctcattcacttctgtcaggctagactctctctccttttcattggcttgtcttagctattaataagtcttggctgggcgcagtgggtcacacctgtaatccgagcactttgggaggccgaggcgggtggatcacgaggtcaggagattgagaccatcctggctaacacggtgaaaccccgtctttactaaaaatacaaaaaaaaaagaaattagctgggcgcggtggtgggcgcctgtagtcccagctactcaggaggctgaggcaggagaatggcatgaacccaggaaccggatcttgcagtgagccgagactgtggcactgcactccagcctgggagacagagcgagactgcatctcaaaaaaaaaaaaaaaaagtctctgaccagggacgctggctcacatcttaatcccagcactttgagaggccaaggtgggcggaacacctgagctcaggagttcgaaaccagcctgtccaagatggcgaaaccccatctctactaaaaatacaaaaattagctgtcatgttacttggcgcttgtaatcccagatgcttggcaggctgagtgatgagaatcgcttgaacccgggaggcagaggtggcagtgagctgagattgtgcctctgcactgcagcctgcgcgacagagtgagactccgtctcaaacagaaaacaaaaaaccaaaaaaggaaaaaatttaaaaagcaaaatgaaatcttttgtgctacacagaaacattggccactcatgggataaaaatctcagggccaagccttgctttatagaaacgtataagcaagtgtagaagtgtttatgtcttggtttcaaggtgactgcatagctaagacaagttgacttaaaggagatcaagactggagatgacaagagtgaaaccagggaaacaacatcttcaaataagtaaacaaggctaccagtgacatccctcagtcctgattaagcctatttgatttcaccagtttttaacccatcatatgtttgcctttcttctccccagtccctggccccacctcttctgccacaaacgtcagcatggtggtatcagccggccctttgtccagcgagaaggcagagatgaacattctagaaatcaatgagaaattgtgcccccagctggcagagaagaaacagcagttcagaagcctcaaagagaaatgttttgtaactcaagtggcctgcttcctggccaagcagcagaacaaatacagtaagatctatatgctcaccatcacgaaagtgatgaacgaagtcctgtcttctctctgagaaactaagtgctctctccatcaaaaataatgtcatcctccccatacttctaggaaaacagaaatgggtattttaacattttgttaaagttggaagacagaggtaccaaagtatttagcaactttccatgtttgcaatcaggtgggggtgggactagagttaaactgccatttattgatttctgacacaggcacagaatgacctgttttctccaagaggctcaatcgtgttttcaagaatcctctctgtaccacataagatcctgcagacaaataacatctagtctgttgttctaaatatctgagactagtgaacttttattcagttcaagtttctgttgaggcccaatacacaaagctctgttctagtgactctgagggaaacttggtgatagtagccagtacccgctctgaggggcttcaagaggagtctgctcctaatagaacctgtgctatctataagtgacagcatcaagagcagggagtaggggccgtgcatggtggctcactcctgtaatcccagccctttgggaggctgaggcgggtagagcacgaggtcaggagtttgagaccagcctgggcaacatggagaaaccccatctccactaaaaatacaaaaagtagatgggcgtggtggcaggtgactgtaatcacccctgctcaggaggctgaggcagtagaatcctttgaacccaggaggctgaggttgcagtgagccaagattttgccgttgcactccagcctgggtgacagggcaagactgttaaaaaaaaataataatgataaataaaaataagaataaaaagcagagagtagcttggtgagagtgaagtcctgcttcctggggcacagagtcttgttcctaaagaggaagaaagatcgcacccgagaatgtgtggaggtagcagtgcagtgtacagagcagggaccgtgggcctgtctcctgggctccatccaaggtgcttgtcttctctgtccctcagtttcctcacctgttcagagggtactacaataatacctacctctgtaaattgctgcagtgaattacatgagctatttcttgtcaatctcctagaacgtttattggcacagagtaaacactatctattagttcttcattctgctgtttctaaattaacagaaacttcattagcatttgggcataggatttccttcatggccttatggtgttatgtgtcacactttatgcttcagatatgattcttaaaatcataactgaagatatgattaaaaaatcaaagatttttaaaatctttcacatacttgtccttgaaattcccagtaaaagggaaaccatcagtcccatagtcctaggggccttcccgactgtacaagaaatcactacttcatgccccagtgcagtgttttagaggagaggctgcaagtcttgggaaagtggccccgaattcagagtcagacctcagggactgtgaattctgactccacttcgttgtggttgaatcatcttgtcaacttccttgatgtgcccttgagtttctctttcttcatctctaaattttggaggatcagatgccagaaagtcaggagactgaagagtaaagacgtggaaatccctgtctagaccctggtactgtggagagttttgtccttgggatggacctggctcctgccctgtaggcaatgaccacagcagcatgtccagccttccactgatgcaggcgtgtctgtcttttctcagaatatgaagagtgcaaagacctcataaaatctatgctgaggaatgagcgacagttcaaggaggagaagcttgcagagcagctgaagcaagctgaggagctcaggtgaggggaccccatgggggcaggcaggggggcaggtgtgtaaatctctgaagtacagtagctcagtggggagacgtaagagctaagctgggccaggggaagggcaggaattgccatggcaggtttgctacacacaaatatttatcaaacagagaagaaggataataaaaatttatgggttgcagttgtttctcagagccttgttttctctttttcaaacaagtaattgttgatgtgaaatttacataacaca

SEQ ID NO: 930 - DNA, 1151 bp, Homo sapiens
cgaatactgagagtgaatgctgaaggaatgatccccattggtggtgaccctcaggtgagactagggtgcctgtgtttcagcaaagcctgggcaattggaatgcagggctcctaagattccatgacacccccaccttctaattctgttattgcaactgcagacggttacctggcacgctggccacaatctacctcactcttatcagagtctgagctactggcagtgccttcagctctgagttgaggcacctcgaaccttgtttttgtggtgaaggatcctaaagtgctgtgggagtgatcacatttttcacaacagtaaggtaagaatttcagttactgacatccctcagtcctgattaaacctatttgatttcaccagtttttaacccatcatatgtttgggtttcttctccccagtccctgactccacctcttctgccacaaacgtcagcatggtgggatcagccggcccttggtccagcgagaaggcagagatgaacattctagaaatcaacgagaaattgcgcccccagttggcagagaacaaacagcagttcgtaaacctcaaagagagatgttttctaactcaactggccggcttcctggccaaccgacagaagaaatacagtaagatctataggctcaccgtcatgaaagtgatgaatgatgtcctgtcttctctctgagacactaaatgctctctccatcaaaaataatttcatccttcctgtacttctaggaaaacagaaatgggtattttaacattttgttaaagttggaagacagaggtaccaaagtacttagcaactttccatgtttgcaatcagatgggggtgggactagagttaaactcacagttattgatttctaacacaggcacagaacgacctgttttctccaagaggctcaatcatgttttcaagaatcctctctgtaccatataagatcctgcagacaaataacatgtagtctgttgttctaaatgtctaggactagtgaacttttattcagttcaagtttctgttgaggcccaacaggcaaagctctgttctagtgactctgaggggaacttggtgatagtacccagtacctgctctgaggggcttcaagaggagtctgctcctaatagaacctgtgctatttataagtgac

SEQ ID NO: 931 - DNA, 502 bp, Homo sapiens
tgaaaatattaagtgtgtgggaatgtagagcaactggaaatggcctacatctttcatagaaatgtaaaccaatacaaatactttgcaaaactctgtccaacattttctacccattcaccaagcaactccatccctagctatagatacccaggaaaataagtatgtatcttcacagaaataattgtatgagaatattcatagttacttatgcacagtagttatcaagtaaacctgtctcccatcagaaaaatggatatcaaattgtgtgataatcatacaatcaataggatattacttggccaaaacaaaatgaaacaagggaaaaacacaatcaaacaaattagtggcatatatacccacttgagtaaagagaagtcggccgggcgcggtggctcacgcctgtaatcccagtactttgggaggccgaggcggcagatcacgaggtcaggagatcgagaccatcgtggctaacacagtgaaaccccgtctctactaaaaatac

SEQ ID NO: 932 - DNA, 423 bp, Homo sapiens
ctggtatgttttctagataaatggctgacttttcacccacaaaagccataatagctgatgcttctgtgtagaaccaagtttcattttgactcaagagctggtacattgcaccccctcatcaaatctctgtgtccacaatctcataaactatcaaattctgggtatttgatgagagaaagcttaatattgaagtatctctcctatgaggtgttagaactatttgcctacaatttattggggaaaaaattgctcatttgtgtacataaacctaggacagagcacatagggaagataacattccaactcaggggaattttgcccaaggctcatgaaagaacccaagccagttttctcaagacttgacctcaggcctactggaatatttctctcaaagtctcctgttctcacattgacaagactgat

SEQ ID NO: 933 - DNA, 1301 bp, Homo sapiens
atatattatatatatatatacgtgtgccatgttggtttgctgcacccattaactcgtcatttacattaggtatttctcctaatgctatccctcccccagccctcaccccatgacaggccctggtgtgtgatgttccccgtcctgtgtccaagtgttctcattgttcagttcccacccatgagtgagaacatgcttgcaccgccgcttctaaatgttttaaaaacagacaccaatgcccttcattggggaaatgaaagacttttaagtaaaacgattttgagtgaaataatatttgttgttttaaaaagttaatattaaccactctccatcatatgttgaaattatcttaagatgtgaaagttaaaattagaaaccttgtaaaggaaaaataggaaatagtttcatgaacttgacacaggaaaatatttcttagactagatactgtagcactcaccacaataagaaatcaagcgaattgcacttcatttttaaaaagcttctccttattatgttgttgtttaacaacttaaacgctatctctagaccaggaataattatttgctatataatacagcaaaaaatatgtatgtataaatggactcattcaaaatatataaagaactcctattacaaagaaattgacaaacagcccagtatatcaatgaatataaaaatttgagaagatattttccataagaagatatctaaatgaacattaggcatgagaaaaccaaattttaggatatcactacacacctggcatagtttaaaagactgaaaatattaagtgtgtgggaatgtagagcaactggaaatggcctacatctttcatagaaatgtaaaacaatacaaatactttgcaaaactctgtccaacattttctacccattcaccaagcaactccatccctagctatagatacccaggaaaataagtatgtatcttcacagaaataattgtatgagaatattcatagttacttatgcacagtagttatcaagtaaacctgtctcccatcagaaaaatggatatcaaattgtgtgataatcatacaatcaataggatattacttggccaaaacaaaatgaaacaagggaaaaacacaatcaaacaaattagtggcatatatacccacttgagtaaagagaagtcggccgggcgcagtggctcacgcctgtaatcccagcactttgggaggccgaggcggcagatcacgaggtcaggagatcgagaccatcgtggctaacacagtgaaaccccgtctctactaaaaatacaaaaaaagaaaaaaaaaaagaaaa

SEQ ID NO: 934 - DNA, 3175 bp, Homo sapiens
cagaaatgtgattgataacagtaaagccacactcctcaagtgcctgaaatacccctcattgtcttcttcaggtggcaagggctctggaacagccacataaaggtgagggcaatatttttactgtagttctttcattgattggtcgattgattgatttttttctcttagagggttagcatacatttatctgaaattgaaattcaagaggagagacaggcacctgtactagttttctctcgctgcctattatcacattaccacaaaccagtggtttgaaaccacagaagtctggaatgaagcggccgggttctctgatcagagtcatgtgagactaaaatccgggaatgggctggctgtgtttttttcctagagctcaagctatttttccaggttcactacagataatgaaagagttcctattcttgtttgtgggggactgagggccctttttctgtgctggctgtcagcggggagacagtctactctgactccagaggccacgtgctttcctccttacctgtctgtttcatctttcaaccaataacaacttatggagtccttctcaagctcccaccttctctgacttcatcttctccaaccagccacacaaagctctgtcatgtatggagtgatgtgattagatccagttcatgcggtaacctcaccatcttaaagtcatataactggcatataacaatgtagtcacaggaatggtgtctcatcaccttaagaggctttagagacaagggtgtggcatgtttggggaccatttcagaaattccatctaccacagtaggacactcacattcccccatctgcaaagtgcatttaccctctcccctgaggtttccagatttcatgtcattaaagcattagttcaacatgaaaaatgtcatgtagaccacatcagatcaaaagcttaaaatcccatctaaaacatccacaccaggtgtgaatgaggcttccgagagtgtccattaagtgcagatccttgacataattcccttacctctgtcgacctgtgaaactgaacaaacagcttatctgtccctaatgtgaaatgatgggacaggcatagaataacaactacagtgattctagttcaaaatgagggaacatggaggggataaagaagtcactaacccaaaatagtttggaaatggagctgggcaaaatcccgcaggagtttcttagtaaggatccacagcctgggactgaccctctgtcctgtgggtctttgcctctgggctctctgctctgcatttcttgaaaccattattatttatcatttttctcacactgttttgcgtatggctcctattgcactcaaaatgtttttgagattcatccatgttgttttgtgtgtcaaaagtttgttcctttagccattccatggaatgaatgtatcacattcttgtattgatagatatttgaatgtatattgatagatatttgaatacaagaatgtatccattcttgtattgatagatatttgaatgtttccagtttttcctattacgaataaaactgctatggacattcttgtatatatcattttctgcacatatgttttaatttctcttggataaatgcttaggaattactgagtcatagaataggtagttgtttagttctgtaagaatatgccagacgttttttcccaaagtgtttatactattgtacattccaaccattaatgtatgaaggtgagaaagctttcgctacttccaaagaggcctctctatatacatgtaattttttctaactggagacaggctgatgacttcagggacatgagcatgggatacctgtcatcaccaccaccatgaagttgggattcaggaaggagtttaatcatgtaaagaatcctgtgaccagtatgagcttctctcaggccacacagggcactcaagtgaacagggtcatggtaagaaagtgtctcattggtaaaaccttttcctctggggaggtaaataaattatttgtttcttcttggtagcccttgaagataaggatggtcaaacaaaataatatcatacctggagaaactcagatcttgctaagatttactggttgggaatccaaagttaatgccaagaagcagctgccagttgggatcaaatgtgagcctatggatcaaggtgcgtactcaaacacagagagctttctgaaagatgctaccagtagtttttccagggcagagatgtgtcctttatttttctctctaatctagcccatatgcttagctgagttttcttcatatcactttaaatgatgatgtcccttgttcaacaattttctaaacattctttagataataattttatgggcattctttattgcattaggcttaaatttaatgcatcttaaggttttattgcaaaatattgccttgtttcctttttaagatgatacaatttataatatgcaaatttgctgtctgtcccctccctttatgtacatagaaaatgagcaaacaggtggccatgaaacagatggtcatagaattgtttcagtgcttgtgagtgcagcaacccaagagtgtcttatctgaaataccaccaggaatgtctggacacagtagacaaaggtttttcaacaggatgccttaggatacatgcttccaaaaacaaagtagccaaaaagaaaccagagtcacagaatatcagagccagaggaacatttggaggtaattcagtacctcctccttttcagcctacaggggagatagtggaagagaagcagggatgggtctgccttctgtgcccacaattcattggagattgttgtggtgaagaatttcttttatgatgaaggagaaataaactcccatcagctttaattcaggcaggtttattgaaaaggtgaagaagcatcttgcagaagcaaagcatggttgaggcttgtgggctctgtctggacaaatgagcagccgacagtggctggtgctgcccctgactctagggccgtgtggtctgtggttgtctgtgagcatctcttctattctcttgcatcgtccctcagcctggcagtctctgtgtactcttcaacacataattgagtgaggctgtaccagccccaatgccatgtagcactttatgtcaaattagaaaggcatgaaataaactggccctttataatacaactgttggaacaacagttgaaaataacaata

SEQ ID NO: 935 - DNA, 9048 bp, Homo sapiens
attgtcacaagggtacacgaatactgagagtgaatgctgaaggaatgatccccattggtggtgaccctcaggtgagactagggtgcctgtgtttcagcaaagcctgggcaattggaatgcagggctcctaagattccatgacacccctaccttctaattctgttattgcaactgcagacggttacctggcacgctggccacaatctacctcactcttatcagagtctgagcagtgctttcagctctgagttgaggcacctcgaaccttgtttttgtggtgaaggatcctaaagtgctgtggggagtgatcacatttttcacaacagtaagttaagaatttcagttactgacatccctcagtcctgattaaacctatttgatttcaccagtttttaacccatcatatgtttgggtttcttctccccagtccctgactccacctcttctgccacaaacgtcagcatggtggtatcagccggcccttggtccagcgagaaggcagagatgaacattctagaaatcaacgagaaattgcgcccccagttggcagagaacaaacagcagttcagaaacctcaaagagagatgttttctaactcaactggccggcttcctggccaaccgacagaagaaatacagtaagatctataggctcaccatcatgaaagtgatgaatgtgagacactaaatgctctctccatcaaaaataatttcatccttcctgtacttctaggaaaacagaaatgggtattttaacattttgttaaagttggaagacagaggtaccaaagtatttagcaactttccatgtttgcaatcagatgggggtgggactagagttaaactcacagttattgatttctaacacaggcacagaacgacctgttttctccaagaggctcaatcatgttttcaagaatcctctctgtaccatataagatcctgcagacaaataacatctagtctgttgttctaaatgtctaggactagtgaacttttattcagttcaagtttctgttgaggcccaacaggcaaagctctgttctagtgactctgaggggaacttggtgatagtacccagtacctgctctgaggggcttcaagaggagtctgctcctaatagaacctgtgctatctataagtgacagcatcaagagcagggagtaggggccgtgcaacgtggctcactcctgtaatctcagcactttgggaggctgaggcgggcagaggacgaggtcagcagtttgagactagcctgggcaacatggagaaaccccgtctccactaaaaatacaaaaagtagatgggcgtcgtggcgggcaactgtaatcaccactaatcgggaggctgaggcaggagaatcctttgaacccagcaggcagatgttgcagtgagtcaagattgcactattgcactccagcatgggtgacagggcaagactcgtcaaaaaacaaacaaacaaaaagataaataaatcaaaaataaaaataaaaagcagagagtaccttggtgagagtgaagtctgcttcctggtgcacaggctcttgttcctaaagaggaagaaagatcacacccgagaacgtgtggaagcagcagtgcagtgtgcaaagcagggaccctcagcctgtctcctgggctccatccatgttgcttgtcttgtctgtccctcagtttcctcatctgttcagagggtactacaataatgcctacctctgtaaattgctgcaatgaattacatgaggtatttcctgtcgatctccttgaacattaattggcacagtgtaaacactatctattagttcttcattctgatgtttctaaattaacacaaactaatcttatgctgtttctaaattaacacaactaatctaaatcttaatgctgcctctcatactaataaagtatttgggcatattttcttcatggccttattgtcttatgtctcacactttaggcttcagatatgattcttaaaaccatatctgaatattgatttaaaaatgaaatatttttaaagttcttgacatatttgtccttgaaatacccagtaaaagggaaaccatcagtcccatagtcctaggggccttcctgactgtacaagaaatcactacttcatgccccagtgcagtgttttagaggagaggctgcaaggcttgggaaagtggccccgcattcagagtcagacctcaggggctgtgagttctgactccacttcgttgtggttgaatcatcttgtcaacttccttgatgcgcccttgagtttctctttcttcgtctttaaattttggaggatcagatgccagaaagtcagaagactgaagagtaaagatgtggaaatccctgtctagaccctggtactggggagagttttgtccttgggatggacctggctcctgccctgtaggcagtgaccacagcagcatgtccagccttccactgaggcaggcgtgtctgtcttttctcagagtatgaagagtgtaaagacctcataaaatttatgctgaggaatgagcgacagttcaaggaggagaagcttgcagagcagctgaagcaagctgaggagctcaggtgaggggaccccgtagggggagacaggcaggtaggtgtgtagatctctgaagtacagcagctcggcggggagaagtaagaacgaagctgggccaggggaagggcagaaattgccatggcaggctcatgacacacaaatatttatcagagaacaaggataataataagttctgtgttgcagttgtttcttagagccttgttttctctttttcaaacaagtaattgttgaggtgaaacttacataacacaaaattcaccaaaggagtgggaaccacccagcagcattcagtataatcaaaatggtgtgctattgccaccccacttacccttagtgagaatcacctcctgactgactgcgtcttctcattctttcactcaatcaatgttgccttctcgaccctgtcattcttttcttctttcgtcttttcaattcgccccatctgcacctggcctcatttctgtacatggctttgtatctagtggccgcaagatgcactatgtgtattttcacatggaaatgtccatggccagagtgaggaactgaaaggatgtctttttgaaacggaattaggaagacacctacttttatttacagaagggaaagatgaatggaacatcatcgaggatcttgcaggagccctctctgatagagggaaagcctgtagaccattttctgttctttctcttggccacagacattcctttcaacatgtgctgaccttctgcttgaaggtctccttgagaacattgtctcagaaatctctgttgcaatatttgaacggatcactcaatgcttttcactgttaaattttctctaccgtctcaccttaggcaatataaagtcctggttcactctcaggaacgagagctgacccagttaagggagaagttacgggaagggagagatgcctcccgctcattgaatgagcatctccaggccctcctcactccggatgagccggacaagtcccaggggcaggacctccaagaacagctggctgaggggtgtagactggcacagcaccttgtccaaaagctcagcccaggtaaggtggccataggccctgatgacccaaaaccccaggcttatgagaggctccagacctccatactttcacaatgacagttgtatcagtggggtttttttctactacacatatgtggccatgacatgatcaggacttcctgagtaagaacagaaatgggaaacccatcggtttggaggtcacagtattgcaagtgtccctccttccttgatggaaggtggtctttggagcaagaggcagcatctatctagttttaaaggacaggaaggaggctgtgatgggagggcgcttgttggagtgaaaagagctctgggctaagaatgaaggttcccaggctgtctttttggcaatgttcttagtaagtgtcggtgagtgagtgatttatctttccagagtttctctctctccatctgcaaaggcagacaaattgtctcttgcaagggtctgaagcatccaaatatgggaacacttacgaatgcttttcaaaatgagatgaagcccctctccgtgtggtgttggagaaggcacttgatgtgggggcatttggtggtaggaagtgcttcagactggagcactccccatggatagaatgtccctgaataacacagcagaagccacatggagggcctgtgcagtctcatgacgcatagaggactgtgggacaagtttgtcctctcctaagagaatgaatgaggtttgaaatgcgaactgtgacaggacaccaagcctgttcctgggaatcagatctgtggcaggatgggggagacagctgccaaagtccagagagaggctgcacaagcctccagtgatatgggaagcaaaaggtcttttcagtatttggccacatcttgatcagggcattttgtgaaggataaaacatgagagttttcagtacaatgctgaaccatacatagatattcatgtctctgtgcacgttgggctgactgtgcttgcagaatgtgaagtgggaaatatctgaacgaacattttgtatttatagaaaatgacgaagatgaggatgaagatgttcaagttgaggaggatgagaaagtactggaatcatctgcccccaggtaacattgaatactcaggagcaagtaatgggtggtaacatatgaaaatgtctaggaggcacgccctctctggcatctatgatgggccaaaagcccgcattcccttggccacagtatgtgaaattcaacccagcttagacacagggtgcggcagctgttgtgtttctctatgtgtgccaagtgtcatgtctgtaccatacagggatagctgagtcttcatcctcttcagctcctatctgtccagtgcactgaacaccagctgctctcttcctctctggctcccatggcagcgaagctctgttgcagagagaagaggattgcctgttccctcttaaagggaacctccatttgttttctgggaccactctcttaatgccgcttgtcaaaaccagctaggactccttggggtccaatccctctgtgtttaatcttctgtcatctctgtcccacctggctcatcagggaggtgcagaaggctgaagagagcaaagtccctgaggactcactggaggaatgtgccatcacttgttcaaatagccacggcccttgtgactccatccagcctcacaagaacatcaaaatcacatttgaggaagacaaagtcaactcatctctggttgtagacagagaatcctctcatgatggatgtcaggatgctctaaacattctcccaggtagcctctattttccttgtgtctcatacctctgtctaggctatggaagatcaattctgaggacaggctgtatatacacatattgttattgttttagtcagaaactaggatggagctaggtgctgtgactcacacatataatcacagcactttggaaggcccaagtgggaggatgacttgagttcaggagttgaagaccagcctggagtatatggtgaaacccatctttacgaagaatacaaaaaattaggcaggcatggtgctgcccgcctatagtcccaactgctcaggagacttaggtgggaggatgggctgagatgatcctcccaccctcattcacttctgtcaggctagactctctctccttttcattggcttgtcttagctattaataagtcttggctgggcgcagtgggtcacacctgtaatccgagcactttgggaggccgaggcgggtggatcacgaggtcaggagattgagaccatcctggctaacacggtgaaaccccgtctttactaaaaatacaaaaaaaaaagaaattagctgggcgcggtggtgggcgcctgtagtcccagctactcaggaggctgaggcaggagaatggcatgaacccaggaaccggatcttgcagtgagccgagactgtggcactgcactccagcctgggagacagagtgagactgcatctcaaaaaaaaaaaaaaaaagtctctgaccagggacgctggctcacatcttaatcccagcactttgagaggccaaggtgggcggaacacctgagctcaggagttcgaaaccagcctgtccaagatggcgaaaccccatctctactaaaaatacaaaaattagctgtcatgttacttggcgcttgtaatcccagatgcttggcaggctgagtgatgagaatcgcttgaacccgggaggcagaggtggcagtgagctgagattgtgcctctgcactgcagcctgcgcgacagagtgagactccgtctcaaacagaaaacaaaaaaccaaaaaaggaaaaaatttaaaaagcaaaatgaaatcttttgtgctacacagaaacattggccactcatgggataaaaatctcagggccaagccttgctttatagaaacgtataagcaagtgtagaagtgtttatgtcttggtttcaaggtgactgcatagctaagacaagttgacttaaaggagatcaagactggagatgacaagagtgaaaccagggaaacaacatcttcaaataagtaaacaaggctaccagtgacatccctcagtcctgattaagcctatttgatttcaccagtttttaacccatcatatgtttgcctttcttctccccagtccctggccccacctcttctgccacaaacgtcagcatggtggtatcagccggccctttgtccagcgagaaggcagagatgaacattctagaaatcaatgagaaattgtgcccccagctggcagagaagaaacagcagttcagaagcctcaaagagaaatgttttgtaactcaagtggcctgcttcctggccaagcagcagaacaaatacagtaagatctatatgctcaccatcacgaaagtgatgaacgaagtcctgtcttctctctgagaaactaagtgctctctccatcaaaaataatgtcatcctccccatacttctaggaaaacagaaatgggtattttaacattttgttaaagttggaagacagaggtaccaaagtatttagcaactttccatgtttgcaatcaggtgggggtgggactagagttaaactgccatttattgatttctgacacaggcacagaatgacctgttttctccaagaggctcaatcgtgttttcaagaatcctctctgtaccacataagatcctgcagacaaataacatctagtctgttgttctaaatatctgagactagtgaacttttattcagttcaagtttctgttgaggcccaatacacaaagctctgttctagtgactctgagggaaacttggtgatagtagccagtacccgctctgaggggcttcaagaggagtctgctcctaatagaacctgtgctatctataagtgacagcatcaagagcagggagtaggggccgtgcatggtggctcactcctgtaatcccagccctttgggaggctgaggcgggtagagcacgaggtcaggagtttgagaccagcctgggcaacatggagaaaccccatctccactaaaaatacaaaaagtagatgggcgtggtggcaggtgactgtaatcacccctgctcaggaggctgaggcagtagaatcctttgaacccaggaggctgaggttgcagtgagccaagattttgccgttgcactccagcctgggtgacagggcaagactgttaaaaaaaaataataatgataaataaaaataagaataaaaagcagagagtagcttggtgagagtgaagtcctgcttcctggggcacagagtcttgttcctaaagaggaagaaagatcgcacccgagaatgtgtggaggtagcagtgcagtgtacagagcagggaccgtgggcctgtctcctgggctccatccaaggtgcttgtcttctctgtccctcagtttcctcacctgttcagagggtactacaataatacctacctctgtaaattgctgcagtgaattacatgagctatttcttgtcaatctcctagaacgtttattggcacagagtaaacactatctattagttcttcattctgctgtttctaaattaacagaaacttcattagcatttgggcataggatttccttcatggccttatggtgttatgtgtcacactttatgcttcagatatgattcttaaaatcataactgaagatatgattaaaaaatcaaagatttttaaaatctttcacatacttgtccttgaaattcccagtaaaagggaaaccatcagtcccatagtcctaggggccttcccgactgtacaagaaatcactacttcatgccccagtgcagtgttttagaggagaggctgcaagtcttgggaaagtggccccgaattcagagtcagacctcagggactgtgaattctgactccacttcgttgtggttgaatcatcttgtcaacttccttgatgtgcccttgagtttctctttcttcatctctaaattttggaggatcagatgccagaaagtcaggagactgaagagtaaagacgtggaaatccctgtctagaccctggtactgtggagagttttgtccttgggatggacctggctcctgccctgtaggcaatgaccacagcagcatgtccagccttccactgatgcaggcgtgtctgtcttttctcagaatatgaagagtgcaaagacctcataaaatctatgctgaggaatgagcgacagttcaaggaggagaagcttgcagagcagctgaagcaagctgaggagctcaggtgaggggaccccatgggggcaggcaggggggcaggtgtgtaaatctctgaagtacagtagctcagtggggagacgtaagagctaagctgggccaggggaagggcaggaattgccatggcaggtttgctacacacaaatatttatcaaacagagaagaaggataataaaaatttatgggttgcagttgtttctcagagccttgttttctctttttcaaacaagtaattgttgatgtgaaatttacataacaca

SEQ ID NO: 936 - DNA, 32134 bp, Homo sapiens
aactgcttaccttaaagaggacgtttgatgctacagtaagttggcatattatccccatattgcatttagcaggttgcaaatggtacagcttgactaagcagatcaactctattcccaggcttctgatttctggcaaaaataacctgtattcaggtacaagattagtaatctattactaaaatgctatagacccagccaggcgcagtggctcacgcctgtaatcccagcattttgggaggccgaggtgggtggatcacttgaggtcaccccggccaacatggtgaaaccccgtctccattagaaatacaaaactcagccgggtgtggtggcgcacacctgtaatcccagctatttgagaggctgaggcacaaaaattgcttgaacccaggaggtggaggttgcagtgagccaagatcatgccactgcactccagcctgggcaacagagcaagactctgtctcaaaaaaatctccaacttgaattccctgttgaaatgatcacttgaacccgggaagtggagactgcagtaagccaagatcgcaccactgtactccagcctgggcaacagagcaagaccctgtctcaaaaaaaaattaaaattaaattaaatttaaaagttcatctcttaaaagcaaaaaatggaatatgatggttcactttttcaagcagtaggaattggaacattattaacagcagccagatgatcatgcagctactgcatcactttcctagaaacgtgtaaaagaatgcaaatctagtgaacagaatggaagggagcaaaagataattgttttatttgggtctcactctgttgcccaggcctggagtgcagtgtcgtgatcatagctcactgcagtctcaaactcctgtgctccagcagtcatcccgcctcagtctcctgagtagttcgaactacaggcatgcctcaccacacctggctattttttgtagagatgggttctcactatgttacccaagcttgtttcaaaatcctggcctcaagtgatcctcctgccttggcctgtgctaggattacaggtatgagcccccatgcccagcatatttatgcctttttctaaattgttacttctttgtgcctttattctatcttgtaaacacttctgacatagcaccagtatcactttattgtacttactttttttatatagctgtggttttgccaggtagtctaaaacccttccaaatgtttgctttattttctgcaatacctaacacatcgtgggtgttaaaaatattcattaactaggaaaaaaatgtttatctgttaaaaaataaataaagattgtcattgctttatggacaatgaatccctttaagtctttttttctttttttaagtaaattaaagtacaacctgatataaagcagtgcttctcaaactttaatatgcatacaaaatcatcttgttgaaatgcagatttttttggggggtggggttgatagtctgtgtttctaacaagctcccaagtgatgctgatgctgctggtccatggagcacactgaggggctaaagtggattcatatccagttgcctctaccaaccaggtgtgagaatttaggcaaatcacttcatctctttgatcctctgtttcattatctataacatggtaacaatatatattccccacacggagattctctcataatgtatatgaaaaatgcaaatgtaagataatgcaaattcattgccctttcataagacctattcatttttctaaatcctgaaggttgttctagtatatcatctaattctcctaaatagtatggtggaagaaaaatgacttggagtcagaggctgggcgcggtggctcatgcctgtgatcccagcactttgggaggctgaggcggacagatcacctgaggtcaggagttcgagaccagcctggccaacatggtgaaaccctgtctctactaaaaaatacaaaaattatccaggcatggtggcgcatgcccgtaatcccagctactcaggaggctgaggcacaagcatcacttgaacccaggagacagaggttgtagtgagtggagatcgtgtcactgcactccagcctgggtgacagagtgagactctgtcttaagaaatgtgtgtgtgtgtacgcacacacgtgtgcatatatgtacacacacgtgtatatatgtgcacacacgtgtgtgtacatgtacacatgcacatatacatatatacacatatatgtgtgtgtatatgtatgtgtgtatatatgtgtatatatgtatatgacttggagtcaggctttggttggaattatagctccatttttactatctgtgattttgggcaagttactttacatctctgagccccatttttctcatatataaattgataatgataataatttccttgaatggtgttagtgaggctaaaaaatatcatatatgtaatgtgcctgtctagtttgtagtagtctctcaataatgtggtggtggtattaccataatattgttagtattatcatcttattattattactgccttatctgttgcagcagagtattgcctgtacagccacaattaggatatataaattaggacgcaagttagttggcaagggaactacatgaagccaacaaggatggctaatcttgctttcctttttcttgggattcagttgaaaggtcagattataatatactctgagcatcatattattggccacatagttatagattgtatggccagttggcttcattctgtctgatagcatcagtgcatccctaaccatttttttttgatgcatactagtagttataacaagaagtcagacctattgccaattctttaaataatggtcacagacacctgagagcccctaccagtagagtatagcatcatctttatataaccaggaacaatgcagtcatcattttctcatagaacccacttaacctgtgtgtgaagatcgtgcaaggaattcgggccatggaagttgactctagccagtactctttggaattgatccaaatggttcattcgtgccttgaccaggtaggtgtgacttaaacattcacttcagtttcgtatttccccttccagcctcagtgtttggtgtatggcatagctataaaccatacaaaaccacatccacttccccagggtagagtgtatttgtggctatacccagaataggtattggtaattcattatagttgtgtgcttcagtgaacaaattcttacttcattctgttttgtaagtgttagtttgtgaaatgaatttcccatctaaattgtgctcgattttttatgaccaagagtaatttctgaatatagatttcaaaaaactgcaatgaaagataatttaccacttctaatacagaatgtctgtatttctcatatctcatggttcccttgctgtgtagttctagtattattcaaagtatgtttcatgaaacactggagtcagaatcaccagggaatgggggagttttgtaagtaaaaagaagattcctgggccccaccccagacgaactcaatcagaatctctgtggataaagcccagaaatctttatttgtaacaaacacctcaggtaattcttctgttctgtatatattgaggttcaagagccactgccctaactgaacaagtgaggaagatgcattataaacattctccttcatgtacaagtgttgattataatgaggtgagaagcataaaatatggagtatcacataagaaatgatttttaaaacaaaaggataatgcagtggtctttgactaattaacatctttagatccgatgtcgcccatttccattaagtgaaaactaaccctatttttactttttaggatcctgagcagagacctactgcagatgaacttctagatcgccctcttctcaggaaacgcaggaggtaaattatgaagaagtcactccattgtcttttctgagatagttgacttttagaggcttgatcagagtactaaaagaaagagtagtgtttcctgacttggttgcaatagtgctattttctaccaacatccctgcttttattgcttaggggtggcatctgacttttgcctccttagcctgtgctgttttgttgtaaatttgtactaatgaggcccaagagcccttcactccccaacccattggttttaaaccttagagttgaggcattagagtgcagtaaggaagaggggtgtctggactcagacatccttatgtttgtatctgaattttgtcattatctttgtcaagttatttaacatcgttatttcttggctttctcctctataaagtaagatgaggtcaggattaaagaagataacgcataaaaagtggtcagcccagggcctggcatagggtgcctatcaattgtagtgtgagttggactggtcctttggtttttttgttttttgtttgttttctgagacagagtctcactctgtcacccaggctagagtgcagtggcacagtcctagctcactgcagccttgaacttctgctgcaagtgattctcacacctcagcctcccaggtagctaggactacaggtgtgcaccatcatgcctggctaatttttctatttttatagagacggggtctcactgtgttgcccaggctgatctcaaagctgttgcctaagcaatcctcctgcctcagcctcccaaagtgttgggattacaggcatgagacactatgcccagcctgagcctttgtttttcactgcatttgtttaggtggtaggttggagttggaggaatcctcttcaggtacattttgcccatatttgaagtcgagttttattgactcctcagaggttatttcctgagattattctgtcagatatctttagagataggaagaacatcctttatccctctgttcctctaggaggtttcataccttaatttaaaacatttatcttcgttaaatatttgagtctgtatttcatcctattacactatttttgccttgctacgcttcttcctccactaccagttttttgtttttatatcttccaaatattcacatacaatgctcttttcaagtcttgctcttggatacattctgtacatccctaattgcatatttgctgtttcatcagtacttttattctactatgccatttaattaatcttttctggttcttctctagttggtctgtagccagtgttttagtgcctgaaattatgtacagtactccagatacagcaccatgaccttccatttatgttttgtgcacgtgcaggcagtatcacccttttggtctggtgaagcatatttaaaatttttgtctggcttatttcacagcaatataatgatttattttattttattttatttacttttatttactttatgagagtctcactctgttgcccaggctggagtgcagtggcgtagtctcagctcactgtaacctccacctgccaggtttaagcagttctcctgccttagcctctcgggtagctgggactacaggcaggcgccaccacgcctggctagtttttgtatttttagtagagacaaggttttactacgttggccaggctagtctcgaactcctgacctcaggtgatctgcctgcatcggcctcccaaagtactgggattacaggcatgagccaccacacacggcataatcactattttaagtcactattttaatctcttatttcttgagtgtaggcatgaaatttttactgagataattatagatttgcctgcaatactttgttggaactttgtactttgatggaaaacataagacagagttttccagacagagaatatagcataaacaaaatcatagacacaggaagttgtggaaaatattcaggaaacacaaaattctatttggctagattagtggttctagacctgggatttttgatgcaaaatatcaggagctttcaaaaagtactgatgcctgagcactactctaggagctcagctataattgatttaggtaggatgacagccctgggctagaacgtggggtgcaaacaaaaggaaggaagtctggaaaaataggtaggaaatcttgcatgccaggccaagaaaattgtggttaattcaagaggtagtgcaaaagatagagtgggtatcacatccactgttgagagatggtggatgtttgcgagagggcagttcacgtgatgagaggcatacctaaggaagagttatttggcaatattagtatctgtgttaaattagtatagtaaaatgattaagactgtagtaagtgaggctgattaggaggtattatcacagtacaggtgggaagtagagctacccagaactaaggtggtgagactggaaaggaagaggtgagtacaaaaagtactatataggtagaatctgtagaacctgaatattaaagaaagggagagagatgaatcagagatgactgaggttttaagcccagttgactgggagaattggggaagggtgttgcggctagttacagaaatagaggagtcagaaagaaaagctcatttgggaaaaagctaacaagctcatatttggagatactgagtttgggagtcagtgggcagactagatgaaggtgtccatcagatactaaatatgtacatcagaggttctcaaggctctctgttccagcctggaccatttctcagagacagaaagcaaatggccccaaactgctggcctttgggtatttaatgaattgtctaatgaaaggactatataactgttttgagttgtattgaggtactttgctaaaagtattgtgatgttgtaggatgcatacagtttataagaggattaaatctgtgaaatgtattaaacagacacctttgcaatataaaaacctattatttcactcatgtatctttgcttttcttttggtagagagatggaggaaaaagtcactctgcttaatgcacctacaaagagaccaaggtaatgttcaagagactcttaaaaactaatatatccgaaattacaaccagggggttctttcttgagtgtaggcattatttgatccgaggatactttggcatcctttcaggagccagcatctgcttaaatgtcagacagtcatttctaagaagaaagctataatttcaccctcacactaaagtggccatcattaccatgatgaatgtggaaaagtgtaggtgttatgggtcagactggaatctgatctggccaagctgtgatgaagccctgaggcaggaattgcaaagtctgctgtgatagagcacattgaaacaagttgtcgagaaagaacatactttctcataccataattggcagttcttctcagggaacagactggaagcatttttctttgatattgtttttaatgttaaatgttcctttgttctgggggttgttggcaggtcaagcactgtgactgaagcacccattgctgtagtaacatcacgaaccagtgaagtctatgtttggggtggtggaaaatccaccccccagaaactggatgttatcaagagtggctgtagtgcccggcaggtctgtgcagggaatacccactttgctgtggtcacagtggagaaggaactgtacacttgggtggtaagtgaacgctaagcattttggaacagtgctgtaagcctaattgtttactgggcccacgatgtctaagcattttattagttgaacctatactaagggagtggcaacatggggtgatggaatggaagctcttataagagcagggattttgtctgtttagttcactgatgtatgcccagggctggtacatattaggtcacctataaatgttttttgaatgaatgaatgagagagggagagaaaaattgaaagactcaggagactggggtttcccatttacagctggatgatttcagacaagtcactcaattactctgttatattaccatgaggttcagagcaactattacctgtgaaatagctttgtaaacaaaggaaggactataccatgtcaggaaacccctgaagcccacagcagtgattgaagatggctaggtatattttgtgtagaatttgtttgttgccctctagattctcccctctcaccttccttaacaaattgtctgtgtttgctgtctgtttccttatctcccactctctcttcattcacctacaatgcagcttccatctctgccactgccactcaattgaaactagtcttgacaaaatgacccataaattgctaaaataaaacagatgctttttagtccttacctagcttgacctctcggcagcatttgacatagttgaccactccctccttcttgaagctttgtctttacttgccttctgtgatagcatgttctcttggctttcctcctgtctcttgctatgcgttctcaggctcatttcaggctgctggagagaaattagtatcttaaacatttattggctgggcgtagtggctcacaactgaagtctcagcacttcgggaggccaaggcgagtggattgtttgaggccaggagtttgagaccagcctggcaaacatgacaaaaccccatctctactaaaaatacaaaagttagctgagagtggtggcgcatgcctgtgattccagctactcaggaggctgaggcatgagaatcacttgagcctgggaggtggagattgcaatgaaccaagattgcaccactgcactgcagcctgagtgacagagcaagaccttgtctcaaaaaaaaaaatatatatatatactgtcacacacacacacacacacacacacacacacgcacacgcacacacatatatatataaaatatgaggacttgtagtatactcatttaatagaattatttttctctataaaactgttgaaaaggccagacatggtggcttacacctgtaatctcaaaactttgggaggccgaggcgagtggatcacctgaggtcaggagttcgagaccagcctggccaacatggcaaaaccccatctttactaaacatacaaaaaattagccaggcgtggtggcgggcacctgtaatccctgctacttgggaggctgaggcaggagaatcgcttgaacccaggaggcagagcttgcagtgagctgagatcgagccactgcgctccagcctgggtgacaagagcgaaactctgtctcaaaaaaaaaaaaaaaagttgaaaagtcatcaaggactagtctcattgctgtatagcagcctctttgatgtagccagattctttataactcttccatgtttcagggaaactgtgaccaaaatttatgaaacttctagtacagattttcaagaagctatattcctgtagaaagcaacaaagttagactatattataaagaatttttttcaccatcacctgtaattaaatatatagtttaccttagacttgaaggacaaagattagattaatggatattaatctggatactttttaagttttctttacctgttggcaggatctgtatactacttgctattaaaatgtttaatccctttgcccatttttttctaatttctaaatttctagctctttttttctactgtttttcttcatatgaagttccattaaagatcagcttttggcatgaaaaattaaaacttcataagacctctcagccggggatggtggttcatgtctacaatcccagcactttgggaagccgaggcaggaggatcacttgagcccaggagttcaagaccagcttgggcaacatagcgagaacccatctctttaaaatttaagtttaataaaatgtaattaaaaaaaaaagtcataagacctctttatttcacagaacatgcaaggaggcactaaactccatggtcagctgggccatggagacaaagcctcctatcgacagccaaagcatgtggaaaagttgcaaggcaaagctatccgtcaggtgtcatgtggtgatgatttcactgtctgtgtgactggtaagccatcagcagaaagtgtcttaagtgcatttaatgtgggggtattttgcttaatgctgtgcaatcttagttgggattttaaaacaaaagacagtatacaaagaaccagaggaccttgagcaaatatactcattaataataacataccaaatttgctatagtattagggggtggtgagcaaggagaagacaggtgggtaacagagaagaggtgggatcaggagaaaatgtgtgtcgtggttggcaggaaaaataatcttaccacctcatcaggctatgaataacacaaaattaggatcaagacctaagtttagttttggtcttgtcattacttagttaatgattccttgggacttatttttttatctatataacaaagatggccccattaaaattttaagtccttttaatgtgataatgctaccactttttaaattgtttaatatagtagtagtagtacacatgactctctgacatagaactctagacttgcacagtctgtccttttaatttcttggatataatcaattcatgtgagatcatttgctggggtagtcctcattccagccctgcccaactttctgattagataaaataagtcagtcctttgatggattctgttttcctttcttttgcagatgagggtcagctctatgccttcggatcagattattatggctgcatgggggtggacaaagttgctggccctgaagtgctagaacccatgcagctgaacttcttcctcagcaatccagtggagcaggtctcctgtggagataatcatgtggtggttctgacacgaaacaaggaagtctattcttggggctgtggcgaatatggtaggggtagccttgtctctgtccacttcttcacaggtatacaacctgacttcaaagttgtatgcatctaaacccatcatgcagcccctaaatgagaagtgttaattcagtaaatcttttttttttttttttttttttttctcgagacagagtctctctctgtcacccaggctggagtgcaatggcatgatctgggctcattgcaaccaccacctcccgagttcgagtgattctcctgcctcagcctcccgagtagctgggattacaggcacacaccatcacacccagctaattttttgtatttttagtagagatggggtttcaccacactggccaggcttgtctcgctcgaacttctgacctcatgatccacctgcctcggcctcccaaagtgctgggattacaggtgtgagccaccgcacctggcaaaagagaatcttacagaacctattcactgggaaggaagccctcattataatgattttcattcttatgtgtgtttcaggacgactgggtttggattcagaagaggattattatacaccacaaaaggtaaaatcagaagcaacttatttctaaaacctatcttaagtcgcacagactccaataatatgtcctctttccttggctctgttgtatcaaggtatttatttccgaagtgtttcctgtttgggagactgacaatttaggattcctgatttagcaccctgtggtcttgtcatctgaccaaatcacagaaaattgagaaagtggatacagcgactgtggacattgtgaagtcacatcttactcagggatgacagctaaaatcagcgtgtacagcagaaaagtcacatatagctacaaataccctggaaaactcgagaagatactgtaaagcagtatactgtctcttaacccaacacagccattttcctctcctgtttctacagttgaccaccagatgaaatattaatagttgtttttgtttagcggtcatgttgcatgaaacatattatctaattactctcagccttgccagagctggccctgtgagaggctcacagaggctgataccagctgggggaaaagcacagtcacatctctcccacctaccctagggcacaggcttacccattggagggttggctaaatcagctataccatttattgttagcagtgttttgggttttctgttttcttttttttttttctttccttgggaacttttagccaaaccagtttttatttatattttaaaaattaaattattatgcatttctagggaccatcctcaatgggattcccagctgttccttttctcctggaaaggctgtggcagaaactgagggttgaggtttcaggttttacacacatccattgtgaccccacacatgcatcaccccaccttctccagtcctgtctagttagctgtaaaaagatatgagcatttggaagtcctagatattacctcagtactctgtcacctctcctataaaatgaccagattgggaccccacagggctactgaatttctgtaactgtcaagcagccttccatctcaaaggacaaaatcagcaatgaattgaagcttctttctcaactttttgacaggtcaccctaagtaggacctattactaagacaaactgagagggtgctgtcttgtttagttgacctggaactgtcaccttttctttgatattgtaaaacttgagctcttcgttgacaacagtagccttgaccgagcacaatggctcacgcctgtaatcccagcactttgggaggccgaggcgggcaaatcacttgaggtcaggagttcgagaccagcctggccaacatggtgaaaccctgtctctactaaaaacacaaaaattaactgggcatggtggcacacgcctttaatcccagctactcaagaggctgaggcaggagaatcgctttgaacctgggaggcagaggttgcagtgtgctgagatcataccactgcattccagcctgggcgacagagcaagactccacctcaaaaaaaaaaagaagaaaagaaaatagtagtctcagccaggcgtgatggctcacacctgtaatcccagcactttgggaggccaaggtgggtagatcacctgaggtcaggagttcgagaccagcctggcctacgtggcaaaacctcatctctaataaaaatacaaaaattagctgggcgtggtggcatgcacctgtcatcccagctatttgggaggctgagacaggagaagtcgcttgaacctgggaggcagagattgcggtgagctaagatcgcacgacttcactccagcctgggcaaaagagggaaactctatctcaaaaaaaaaaaaaaagaaaaagtagtctctaagacactgggcaaacctgaaaagaatagagcagtcctcactttcctgtagtcattctgctaaatgcagcatgtctcttttgaaagaatttgagagctttttttctaatacgaattatatatttgggatttctttttctgatttttttcttgcaggtggatgttcccaaggccttgattattgttgcagttcaatgtggctgtgatgggacatttctgttgacccagtcaggcaaagtgctggcctgtggactcaatgaattcaataagctgggtctgaatcagtgcatgtcgggaattatcaaccatgaagtgagtgtcctgattggtgttctaaccacatcatcagaatttctctaggttggaatttctttgagatgccattattggttagtgaccatggaatttgactttagttatggtctcataggcattgtgtgcagaaaaagaagccagccacaaagagtacatgctatatagctctatctgtgtaaaatttaagaacaggcaaaattaacttatactggcagaaatcaaaactgtggctacttattgaaggaggggtattaacagaagaggtggaagggatcctagagtaatgggaatggtctatatcttgatctgtaatggttttaccagtatatgtatatagaaaaatgtgtcaagctgtgtgatattttgcagtgtgttatacttcaacaaataaattgattacaaagaataaaatgatgaaattcagcttttaccttattgaaataggaacaagcaaattaatgttataaaaaaaaacatatttccatgcatcaccttcctggagtttttttgattgattggagttttttagatttctcccaaatcactgatcctgtttaggcttatcgaatgtaattaccattctgtcttcaaaaatgttagcaaattcaccactgatattgtcttagtttccttttttttttttttattatacttttaagttctagggtacatgtgcacaacgtgcaggtttgttacatatgtatacatacgccatgttggtgtgctgtacccattaactcgtcatttacattaggtatatcgcctaatgctatccctccccccttcccccaccctatgacaggccccggtgtgtgatgttccccttcctgtgtccaggtgttctcattgttcaattcccacctatgagtgagaacatgcggtgtttgattttttgtccttgcaatagtttactgagaatgatggtttccagattcatccatatccctacaaaggacatgaactcatccttttttatggctgcgtcttagtttcctttttgtgttaatataatgagttttgtcattttccaaagaataaaattaagagacagaagttttctgactcaatgaaaaaggtaagaattaatttttaagcaatctctaaagtagtgattttcaattaggagagtacaaattcagggcaaggctggagagagtgtctttgtagtttgaaaagaaatattcagttgccgggcacggtggctcacgcctgtaatcccggaactttgggaggctgaggcgggcggatcacgaggtcatgagatcaagaccatcctggctaacacggtgaaaccctgtctccactaaaaataccaaaaaaaaaaacagccaggtgtggtggcgggcaccggtagtcccagctacttgggaggctgaggcaggagaatggcgtgaacctgggaggcggggcttgcagtgagccgagaccgcgccactgcactccagcctgggcgacaaagcaagactccgtctcaaaacaaaacaaaataaaaaaacaaaaaaaacaatattcagaattactattacttgatttatgttttcattatagcagtggatttgttgtgaaattttaaacttaaatgagaggattcttttttaatactaattcaaagggaacatgagttttaattaagttgagaaacactaccctatagatgaaattagatcacagtaagctgattcctttatgggctggagacagtcctcaggactttaattctttgccctgcccttgttagatatgcagagtgtataaccaaggtaaatgtcaacgattctctccttatataaataccttctgggatggaaagttcatgttttataaaccctaagtcagaatctaaaactttggttgtcagaaagttctgcctcatgtgctgcattctctgattacatattcagcttatttcctcttgttttctgttggagatggaaaactacctggcaccctcttcttagtaatataacttacttgaaaggccttttggtcaccaggacttttttccattctcagcctgattttccttcgattttcttacctcatgcatctgctttgtgttttattttgtttcaggcataccatgaagttccctacacaacgtcctttaccttggccaaacagttgtccttttataagatccgtaccattgccccaggcaagactcacacagctgctattgatggtaagttgatttacaactgtatcacatgccttagtagctgagcctcttttattctatcaggtattaggttttctttatatgtatatcatcccgatttcccctgaaaatctagtattatttcattaatgtattcaggtacatatttttattgataattattataaatgcataataaatacatccttttatgagaacaccacacctatgattccagacatctgttgtctctgattagcaccttttataagtattctaaggtagtactcatttttctcactacaaatacagtactggagagagaatacaatatcgagtcgctgactggatctaattggttatagtgcctagatactgtatttgtcctaggtccaggatcatgtggctagttttatatttgtatattctaacaaccggaagctaatccatgaagtctgcttggctgcatcttctctgggttccaggactcatttgtgccttgttatttctttttgcttctctctcagagcgaggccggctgctgacctttggctgcaacaagtgtgggcagctgggcgttgggaactacaagaagcgtctgggaatcaacctgttggggggaccccttggtgggaagcaagtgatcagggtctcctgcggtgatgagtttaccattgctgccactgatggtgagtctgtacatatcatttcaagctttctggacacatggctgtgtttcagttcttggctgggaaagaaatggactagttatttgtatagctgaattgtggatgtacttttttatttgtattaaattggtggccggttatatatattgagctttattaacttttcatgtgttcaacatagtgattgtttttaaaggccagatttctagataatgataggttaatgttctacattcctccttttttcatttcagctttcacttttttggtaaaatgttataagaattattaagtacttctatataacttgcccagtatcttgttgattgatttcagtaaacattgattgggtagctggagagaacagcatattttctctgttggctggggtcacctgtactgcagtgatgtccatagggactgctaaggtttgaagggctgctttccgctatattatgtatctctcagatttctgagttggtctaattgatttttctcctctcttttctctgagacgatttttttgtttgtttgttttgttttttgaaacagagtttcgctcttgttgcccaggctggagtgcaatggcgcaatctcggctcatcacagcctctgcctcccaggttcaagcgattctcctgcctcagcctcccgagtagctgggattacaggcatgcgccaccatactcggctaatttctgtatttttagtagagacggggtttctttatgttggtcagctggtctcgaactcccaacctcaggtgatccgcttgcctcggcctcccaaagtgctgagattacaggcgtgagccattgtgcctggccttttttttttttttttttttttttttttttttttttgagatggagtcttgctctattgcccagcctagagtacaatggcgcgatcttggctcactgcaacctccacctcccgggttcaagtgattcttgtgcctcagcctcctgagtagctggaactacaggcacaaaccaccacgtccagctaatttttgtatttttagtacagacagggtttcaccatgttagccaggctggtctcgaactcctgacctcgtgatctgcccacctcggcctgccagagtgctgggattacaggtgtgagccactgcacctggtcctctgtggctatttctttccgcagtattgtctggttcctcactcctcttcttttttttttttttttgagacacaatctcactgttgtcgcccaggctggagtgcagtggcgcgatctcagctcactgcaactaccgcctcccaggttcaagcgattctcctgccttagcctcctgagtagctgggattacaggcactcgccaccatgcccagctaatttttgtatttttagtagagatggggttttgccctgttagccagactggtcttgaactcctgacctcagatgatccacccgccttggcctccgaaagtgctgggattataggcgtgagccaccactcctggtcactccttctcttctgtactgctgctgttgctatcctacattcccttccttctttgcttgcttttttcctcttttttctttttcctgtgtcatcatctgaacttctaaatttttgtagccacttttttcacttgactggtaacaactcacatttcattttctctctttttctttttgagacagagtctcgctctgtcacccaggctggagtacagtggtatgatctcggctcagtgcagcctccacctcccgggttcaagtgcttctcctgcctcagcctcccaagtagctggaattacaggcgtgtgccaccatgcccagccaatacatttaatcttcttatcttttgactcatcaacttttttgttgttgcttgtgctctgagatatccttgttttcttttggtccatgcctgttctgtactcatgaggggtctcagggatattgtgatctgttaccatatttaaataaaccagcattcagaacagcacattaactctctctgcttgtcccaaaataagggactttaaggagcaaactgtttaggtcagacttggataaatggaaacgttacacaggacagtcaggatgtcactgaagataaatttagtgcagcaactgcagtagcactttctgacagggcttcagagagctcatgtttcttgaatagatctgtgtagttcatgactttaacttcagaatgaggaatgtaaatttggattctgtggctgggcatattacctcttgatgttcctatactcctctgaactgtacttgatggcctcattcatgtccaagtcctcttttaggctctaggaatatagaaatgagtctcagaaaactcctgctttcaaggagctcacactctagtagaataggggactagcacaggcaggtgttaggtgctataatagcagcagcctagtcttctaagtcctggagtaccccaaggctcacttgtctctccaaagtgagcttgttcccttaaattccccctatacattgactgctttatatcaccaggcttgaccttcagactcatttattcaacagctcctcaacttgatgtctaaatttagggtgggccatataacccagttatcttagaccaatcctgattcatgccttcatgcctgttgtcctggcttaatgattaatagccaccctgtttcatttttttttaaaagcctgatttggataagaagttataggcatctcagacaaacttagtatactcaaaatcaaacttctgattttctgcccagatctgtacctcctgcagccttcctgtctcagtaaatggcaacttcctcctacactccacatcccatccatattggttatcttcagaataaatccaaccacttctcaccatctccactacaactggtctccctgcttccatccttgctcccctgccatcagttctcctcagtagacagagggattctcttaaataactactgctcaaaacctccagtggtttcctctatcagtcagtaagtgccagagtcatcacagtggcccgactggccctatgtgagcaggacctcagccacctcctgaccccttctgttattccgtcccttcctttactttgttctagctgcaggggtctccttgttccttgtttgtgctgctgacattacttttgctgttgctcttctctctgcctggaaactcttcgtcactccagtagatctctgttcaagtgtcagaactcctctgacctaccctatctaaaataatgatatcccaccccactgttactctttgtttccacttatttttctccaccatttatcttcatagcatttatcaccaccttaaatattaggtgtatatttattattatcagtctcccctactagaatgtcagttccacagggcaaggacttggttttgttcactgctctatcaccccatgcagtacctgtcatgaaatagatgttcagtcactgtttgaatgaatgaccaataaaaagttgttgaagaaaaaggtgaatgattggatgaatgaatgagtgaatggcagtacataggaagagtgggcatttttacccaagtggaatcaggaagagtttaagctttatataggagaataaacagctttcccttgtttagtacatagtgggaagtctttctagctctaggatataaagatggggaacccggagaattgggaagccagtgttctgttaaatggtctactgtttaacttttttcctagataatcacatttttgcctggggcaatggtggtaatggccgcctggcaatgacccccacagagagaccacatggctctgatatctgtacctcatggcctcggcctatttttggatctctgcatcatgtcccggacctgtcttgccgtggatggcataccattctcatcgttggtaagagtttcatatgtctggggttgggatggctttgacagaggatggacccacatctgagtactgttagtcacattgttggaaacagaaatgtcctgaagaagccatttctgtaagtcttgtaatggtcaaggatgccatgcctagtggtgggaacagaacattgtcatttcctggagctttgctatctgccatctcttgattattttttaatataagtttgggctctgcctgcccccttagaattgatttttttggttgtttttttttgtcttttttttgagttggagtttcactcttttcgcccaggctggagtgctatggtgtgatctcggctcactgcaacctccgcctcttgggttcaagcaaattctcttgcctcagcctcccaagtagcttggactataggtgcctaccaccacgcctgactaatttttgtatttttggtagagatggggttccaccacgttggccaggctggtctagaactcctgacctcaggtgatccacctgcctcagcctcccaaagtgctgggattacaggcatgagccaccgtgcctggccctagaatttgttacttctaatcatccaccaattaatttgttgtctgtgctcatgctttcatgagaaacattcagtacatcctttaaaagaaactttaaattataagcactttctgcataaagattactttgttaggaactactttataaatgcctgtgtaagggtttataagtctacttttagatcagtggtttgcaaccttagcagcacatacattagaatccttgagaagctttttttttttttttttttttttttgagacgaagtctcgctctgtcgcccaggctggagcgcagtggtgcgatctcagctcactgcatcctcccaggttcaagcgattctcctgcctcagtctctcgagtagctgggactacaggagtgtaccatcacacctggctaatttttggattttttagtagagatggggtttcaccatattagccaggctggtcttgaactcctgacctcatgatctgcctgcctcggcctcccaaagtgctgagattacagacatgagccactgaacccggccaagaagcttttaagaataccacggtccagaccctatccctgaccaattaaatcagaatctctggggtggaacctacagacctatgcaatgttacttcctttttttaaattttgagacagagtctcactctgttacccagagtagagtgcagtggcacagacacagctcactgtagtttcgctctcccaggctcaattgatcctctcacctgagcctcccaagtagctgggactacaggccagtgccaccacacctggctagctttgcatttttttttagagattgggttttgccatgttgcctaggctggtctcaaacacatggttactttttaaaacttcccaggtgattccagtgaccagccaaggcagacagttgctaatgtagatagtgaatatacttagaatagcaagtggtgcttagcttatgatactaatttctaaaactgtaagttatagttctaaagttatctggagtcaaggagagcaattatctccctatcctagtcttctctcatttttcttgcctatatcagtatacagtgcttacctaccaaatattttttctcagagaaagtattgaattctaagaccatccgttccaatagcagtggcttatccattggaactggtaagtaccaatgtttcaggtaccagtggttttctgaagtgtgggtcttttggttagattccatgtagactccaaaacccaaaggaaaatgggaaatgtctttgggaagtgaggaatacagtggttaagagagaagatcatattttgtttggttttgcagtaagttataacttttacattgtggtcagagagacactacatcatctttgcctccaacgcatatgcaagtaattaagtagcttgcccagtactgtaatatgacttatgtattattcctttccttactattctagggggtaatgagtcctctacttccacggtattcccaggggtattccagtctaaagaaatagttcaccaaaacaggcactcagaataaaactcggctaaactttcagtgtggttaggagaatcatcccaaagatctctgatagatttcctttgactgctgtcttcatggttctctattattggggaccatgctaggaaattgaatctattttcctttttggttttctacctgctagagtccctgtagtctttgatgtctcagaaccaggattctgatttattttatttatttattttttttgaggcacagtcttgctctgtcatccaggctggagtgcaatggcgcaatctcggctcactgcatcctctgcctcccaggttcaagtggttcaccttcctcagcctcccaagtagctgggattacaggcatgcaccaccacactcagctattttttgtatttttagtaggtttggccaggctggtctcaaactcctggcctcaagtgatctgcccacctcagcctcccaaagtgctgggattacaggcatgagccaccatgcccagcccagattctgatattgtttggaatcaaaacacataaacacccagaataaaagcagattaaagctgggcacagtggcacagccgttagtcccaggtactcaggaagctgagtcaggaggattacttgaggccaggagttcaaggttacagtgcactatcatcatgcctatgaatagccactgcaatccggcctgggcaacatagcaagaccctatctcgaataaatgaataaatacataaacaatcggtcaatcaaacagattaaacctccaaaaagaaacagctgaaaacatgatctagacttgttgaacttcagtttacacatatacactgacttattacaccatattatatatagttaagtagcccattgcttggcatctctgtttatgtatattaatatctgtcaaaactgactgaagatctttcgctaagcacagcagttctactacaagtttgttttactagaacagtatttaaaggaaaaacataaaattaaaagcaaatgtccattggtgggaagatgtaaactcgaggaagagcagggatttttgtcttttttatttatcaattttatctacttccctagaacagtgcctggcaaatggtaaatgctcagtaactatttgttgattaaatgcgttataaccatccattggagtgaaagtgaacatctccaaatatttccataatgtgaaatgtaaaaagcaagttgcagcagactacatgcctttttataaagtttagaaacaagtaaaataggctgggtgtggtggctcacgcctgtaacaccagcactttgggaggccaaggcaggcagatcacaaggtcaggagattgagagtatcgtggccaacatggtgaaaccctgtctctactaaaatacaaaaaaaaattagccaggcatggtggtgcacacctgtagtcccagctacttgggaggctgaggcaggggaatcacttgaacctgggaggcaggggttgcagtgagccacgattgcgccactgtacagccagcctggcgaaagagtgagactccatctcaaaaaaaataaataaaagtaaaatgaatagtaatgtattatttaaggatacataaaggcgataaagtttttaagaagaaatgataaatataaaattaaacagaatggtttcatctgggtaggaggccagagaaggaaggaattcacacggcaaatacagtgatataggtaatgctctagttcagcagtgtccagtagatctttttgcaacaatggaaatgttccatatcggtgctgttcagtatagtagctaccagctttctgtggctattgagcactccagagagtggcttgtgtgactgaggaactgaatttttaattctctttaagtttaagcgggcacatatggctagtaactcatattggatagtgcaattctagttctagtggcaaatagacctatgtttattgttaggcatgaaaatttacacgtatgttaaaatagtcttaggtatatctaaaatgcagcataatcttaaaaagccatttaaaacaaaaagtaagcttcagaactcactttggtaactatagttctgctgcttccgtaggatctcagcatgacccagttagtccccaggccagcacagcaggtgataattaacccttctttacatttagcctcagaaaataccaggcatcagaacaaggatccctgaggagtaagagaaaaaaaaaaagaaaataccaggcaatttttctttaactttgacagattaatcttcttaattatatttttatttggcccatattaaaattcagtttcatttcctgaccacacatcagctagtcttcattaaggttgcttggaatatgctgtatgatatgaaagaatcagccattatattataaaaatggatacagatagtcgtcagagaatgtaatattcacattaaattttgaagaattggccgggcgcagtggctgacgcctgtaatcccagcactttgggaggccgaggcgggtggatcacttgaggtcaggaattcaaggccagcctggccaacatggtgaaaccctgtctttactgaaaatacaaaaattagccaggcatggtggcgggcacctgtaatcccagctactcaggaggctgaggcacgagaatcacttgaagccaggaggcggaggttgcagtgagccaagatcgtgccactgcactctagcctggatgacagaatgaaactgtgcctcaaaaaaaaaaaattgctgggtgcagtggctcacgcctgtaatcccagcactttgggaggccaaggtaggtggatcacctgagttcgagaccagcctggccaacatagtgaaaccccgcctctactaaaaatacaaaacttagctgggcatggtggtgtgtgcctgtaatcccagctactcgggaggctgagacaggagaattgcttgaacctgggaggcagaggttgcagtgagccaagatcgggccactgcactccagcctgagcaacagaagctagactcggtctcaaataaaaaaaaaaaagttgaagaattcaacattcagattttccccggacagggagttaatggtaagtttatctggcaactttaagaggagtttggctcaaatattaaagacctttttatataagataagtgtctatggaggatgctggaatctgaatgtatctcttaaagaagcagagtaagcatgggtgctagatttggtgggctgtggttggggggattgtttggtaatgcttttagaatattgataacctgctatggatacaagataaacaaagttggtaaatggaagtgaattatcattatgagcatcctgatatacaaatacaactatacaaaattacaaaacatagtttgtatgaaaaccaaaaatttagtccctaacatttgacttgcactgttgccattgcacttcatgcagcttataggcacctttccagggtaagtagggttgtcaaatggtaaatctgtcttgctgcatagcaaagctgtctatttctgtgctgtatatctgtcagtgtttcagagctctagcccgggaggaggcggcgggggcggcggtggtgaagaagaggacagtcagcaggaatctgaaactcctgacccaagtggaggcttccgaggaacaatggaagcagaccgaggaatggaaggtttaatcagtcccacagaggccatggggaacagtaatggggccagcagctcctgtcctggctggcttcgaaaggtaattcctttggaagaagtaacttggataaaatatgtggccctttgcaggaactagaaagagctgtcagggtctctcagttttccaagtacctagtaaactgttgtgcatcctgaatccagccttctgatttctacctggaaagaaattgcctaatcactaatccttttttctttccaaaaagataaaaaatgttctcatacccttgttacttaagtgaatgtattataagttactataacctaccttgatggcagtttttgtagtacatgtatataaagattaagcttacagattttatactgtcatttatagaaatggaatattggagcagttggaatgccttacaataggaaaatggttgatgaaagttgagatacagaaagtaaaaatgttggattgggcacagtggctcatgcctataattccagcactttgggaggctgaggcaggaggatcacttgagcctaggagctcaagaccagcttgggcaacacagcaagaccttgtctgtaccaaaaatttaaaaaattagccgggtgtagtagtgtgcacctatagttccagctactcaggaggctgaggcaggatgatcacttgaacctgggaagtcgaggctgaagtgagccgagctgtgccatgattgtaccactgcaatccagcctgggtgacaaagcaaaaccctgttcaaaaaaaaaaaaaagtaagaatgttgaagtatatttattttcatggaaagttactcacaacatatggctatgcagaagaggatgatatatctgtatgatctcattcttttaggaaatatgtaacacacaaaagaatgtcaacaagactatgtattgacagtttttaaagtggttgtctgtaagtgatggaattgctggtgaattttattagtttcctttgcccatttgtattttctcattttctacagtaaatatttatggtttgtgaaattttaaattttttaccaaaaaaaaaaaaaaaaagaccgagcatgatggctcccagctgtaattccagcactttgggaggccaaggcaggaggattgcttgagcccaggagtttgagaccagcctagacaacatagggagaccccatctctataaaaatttaaaaaaaaataaggccagggccaggcatggtggctcacatctgtaatcccagctctttgggaggccaaggcgggaggatcacctgaggtcaggagtttgagaacagcctggccaatcatggtgaaaccccatctctactaaaaatacaaaaattagccgggcaaggtggctcacgcctgtaatcccagcactttgggaggctgaggcgggcggatcacaaggtcaagagatcaagaccatcctggccaacatggtgaaaccccatctctattaaaaatacaaaaattagccgggcgttgtggcgcacgcctgtagtcccagctgctcaggaggctgaggcaggagaatcgcttgaacccaggaggtggaggttgcagtgagccgagattgcgccactgcactttggcctggtgacagagcgagactccgtctcaaaaaaaaaaaaaaattagctgggcatggtggcacgcacctgtaatcccagctacctgggaggctgagccaggagaatcacttgagcccaggaggcgaaggttgcagtgagccgagatcgcaccactgcagtccagcctgggcgacagagtgagactccatctcaaaaaataaatagataaataaataaggctgggcgaggtggctcacacctgtaatcccagcactttgggaggccaaggcgggcagatcacttgaggtcaggagtttgaaaccagcctggccaacatggtgaaactctgtctctactaaaaatacaaaaaattagccagttgtggtggtacacgcttgtaatcccagctacttgggaggctgaagtaggaggaccacttgaacctgggaggtgaaggttgcagtgagccgagattgtgccactgcacttcagcctggtgacagagtgagattctgtctcaaaaaaataataattagccgggcatggtggcacatgcctgtggtcctagctactcaggaggctgatgtggaaggattatttgagtcccaaaggtcaggactacagtgagtcatggttgtgccactgcactccagcctgggcaacagagcaagaccctgtttcaaaaaaaaaaatctgtaggtttaaagctccctgtctaataagactaaacttgctagtgatttgaggagcgtgaacagaggaagcagcatgctgttctgtctgcacctttagcctcagctttcagcagtgttgcagccagcctcactgacacttccttggagcgccccagctcactgaatagcctgtgtagaataagcgtgttggagtgacacaccagaaactccagcctgtgttctttgagtttgcctttgcatcactgtttctctgatgaaggggtggcagttttttcacaggtaggctgtgatatgttgttaaccacaactgtcttgcccactagagggtgctgaagtcatgagagagggaaaactatagcaaaaagaagggaatttgggaggaagcaaatactgcaaacagactaatgagattctttctcatatacataggagctggaaaatgcagaatttatccccatgcctgacagcccatctcctctcagtgcagcgttttcagaatctgagaaagataccctgccctatgaagagctgcaaggactcaaagtggcctctgaagctcctttggaacacaaaccccaagtagaagcctcggtaactgagctttttgcctttgaatcacaactaggtaaacagtcactgcaagctctgcctggttcttctggcctcgctctagcttttgggtttcagctgccctgcatcaactcattatactgtctattcagcagtacttaaagcctcaacccaagactaaactgagttgcctcagaaaggtatttacccttccacatttctgacaggctaacacctttctaaagggattgtcttttccctctgcctcagaaataccaaaattcaaattcagtttttcatgacactggcagggtaggttagaggctctaaatataagaaagaagtaatactggtagtctagtgaggaagcaacacatgtacacctaaccttggtaaaaatgacattgtggtaaatacctcagtaaaactataatccaaggtcatgaaactttttctataaaaggctacataattattttagacttttcctattaaaggccacatagtaattattttagaccattttagacagaaatgtgtacagcctcttttgcaactactcaactctgacattgtagcacaaaaagcagcttcaagtaatacataatgaatgggcatccttgtgttccaataaaattgtatttacaaaaacaggcagtgggccagaattggcctatgggctatttgttgaaccctcctataaaaaaagtacagtagaaaagagaaaaatccagactaggatcatcagaaagcttcccagaagaggtaataatacctttgaaacttcaaggtgaatgttttaatttctctgtcagttcaccttcttaaattgtgttggtggtcctgtttactgaccacctctcagatcttttctaaagtgtgattcactgcatatcatgaatattgaccctttgggtctgtgatctgaaagacttgttccaaaccaaatcatgcttttccctacttcagcattttaaatgagaagataccaaggtgctttaaaatttttcacaaagtcctccaaaatagatgattggtctcccaccttggcctaatggggactgaggcagagagttcactttccatgttatgtcagtgcccatcgctgttataatcctagcatttctgtttctcgtacatatattcatgtgtatatatgatttatcttgttaatttaaaagtaaaatccgattgcacttagaggaagtttggattgaggagctatgacacctgggcagaacctcctgcaatctccttcttgtctctctagtcacctcggctgaatcctgcagtaacctgtgctgggaagggaacaccactgactcctcctgcgtgtgcgtgcagctctctgcaggtggaggttgagagattgcagggtctggtgttaaagtgtctggctgaacaacagaagctacagcaagaaaacctccagatttttacccaactgcagaagttgaacaagaaattagaaggagggcagcaggtgagagcattaaaagaataatccaatttctaagcctgttttgaagaatcacagaaacaaaacacaaagtactgaaatagacttgttcctttgcaggtccttactttttttttgagacggagtctcgctctgttgccaggccagagtgcagtggtgctatcttggcttactgcaacctccgcctcccggattcaagcaattctcctgcctcagcctcccgagtagctgggactacaggtgtgcaccaccatgcccggctaattttggtatttttagtagagacagggtttcaccgtgttggccaggatggtctcgatcacttgacttcatgatccacccgcctcagcctcccaaagtgctgggattacaggtgtgagccaccacgcctggccgatccttagtttttaatgataccatttttgtaattataatcccagaagccttgggccttgttcaggcacctagattgaatcattttcatcacttgcattgctttttcttagtgtatgttttttcttttacaatacttaattacatacctctgaaaatagacattctcctgaacaaccacaatactataaccacacctaaaaaaattaatactagtattgtcaattctcatctagtatccagctgatacctcaattttcccagttttcccccacaaaaatgtcctttataaccattttttatcagactagaatccagtcaagaatcccacattatatgtatgtctcatttcttttcatctaaaacagctccctccaccaccatcaccttttttaaattattttatttttatttttatttttatttttatttttattttttgagacagtctcactctgttgcccaggctggagtgcagtggcgtgatctcggcttactgcaacctccaccgcccgggttcaagtgattcttctgcctcagcctcccgagtagctgggactatagacgcttaccaccatgcccagccaatttttgtatttttagtagagatgggatttcaccatattggccaggctggtgtcaaactcctgacctcgtgatccacctgcctcggcctcccagagtgctaggattacaggtgtgagccactgcgccaggccttatttatgtatttattttgagacagggtcttgcattgtcaccaaggctggagtgcagtggcacaaacatggatcactgcagccttgacttcctaagctcaagtgattctctgacctcagccccccaagtagctggaactacaggcatgttccaccatgctctgcttcaccttttaaaaaaatacttttatgacattgacttgttgaagaaaccagggcagttgttcaacagaatgtcccacattctagatttgtcttgttttctcagggtgttgtctaacttgtttttctgtcaccctgtcttttctgaaaactggaagtttaacctaaggcttgattagattcacattaaacatttttagtgaaaatacttcaaaggtgatgctgcttgcattatttttcgagagccatgctattgttttatatagagggaagtagaagcagagaaatagggttaggcccttggctttgccatttgccagctgtaggtgtttgggctactttgttttctctgagccctggtttctcacctgaaagaaaataatagacaccttgtatggttctttggaggattaaatgaactaatgtttatgaaattactttagaaaataatatacaggctgagcacggtggctcacacctgtaatcccagcactttgggagattgcttgagcccaggagttcaagaccagcctgggcaacctggtgaaaccccatctctaccaaaaataaaaactaactgggcatgatggcacacgcctatagtcccagttattcaggaggctgaggtgggaagatcacctgaatctgggg

SEQ ID NO: 937 - DNA, 32192 bp, Homo sapiens
tttctcatagaacccacttaacctgtgtgtgaagatcgtgcaaggaattcgggccatggaagttgactctagccagtactctttggaattgatccaaatggttcattcgtgccttgaccaggtaggtgtgacttaaacattcacttcagtttcgtatttccccttccagcctcagtgtttggtgtatggcatagctataaaccatacaaaaccacatccacttccccagggtagagtgtatttgtggctatacccagaataggtattggtaattcattatagttgtgtgcttcagtgaacaaattcttacttcattctgttttgtaagtgttagtttgtgaaatgaatttcccatctaaattgtgctcgatttttatgaccaagagtaatttctgaatatagatttcaaaaaactgcaatgaaagataatttaccacttctaatacagaatgtctgtatttctcatatctcatggttcccttgctgtgtagttctagtattattcaaagtatgtttcatgaaacactggagtcagaatcaccagggaatgggggagttttgtaagtaaaaagaagattcctgggccccaccccagacgaactcaatcagaatctctgtggataaagcccagaaatctttatttgtaacaaacacctcaggtaattcttctgttctgtatatattgaggttcaagagccactgccctaactgaacaagtgaggaagatgcattataaacattctccttcatgtacaagtgttgattataatgaggtgagaagcataaaatatggagtatcacataagaaatgatttttaaaacaaaaggataatgcagtggtctttgactaattaacatctttagatccgatgttgcccatttccattaagtgaaaactaaccctatttttactttttaggatcctgagcagagacctactgcagatgaacttctagatcgccctcttctcaggaaacgcaggaggtaaattatgaagaagtcactccattgtcttttctgagatagttgacttttagaggcttgatcagagtactaaaagaaagagtagtgtttcctgacttggttgcaatagtgctattttctaccaacatccctgcttttattgcttaggggtggcatctgacttttgcctccttagcctgtgctgttttgttgtaaatttgtactaatgaggcccaagagcccttcactccccaacccattggttttaaaccttagagttgaggcattagagtgcagtaaggaagaggggtgtctggactcagacatccttatgtttgtatctgaattttgtcattatctttgtcaagttatttaacatcgttatttcttggctttctcctctataaagtaagatgaggtcaggattaaagaagataacgcataaaaagtggtcagcccagggcctggcatagggtgcttatcaattgtagtgtgagttggactggtcctttggtttttttgttttttgtttgttttctgagacagagtctcactctgtcacccaggctagagtgcagtggcacagtcctagctcactgcagccttgaacttctgctgcaagtgattctcacacctcagcctcccaggtagctaggactacaggtgtgcaccatcatgcctggctaatttttctatttttatagagacggggtctcactgtgttgcccaggctgatctcaaagctgttgcctaagcaatcctcctgcctcagcctcccaaagtgttgggattacaggcatgagacactatgcccagcctgagcctttgtttttcactgcatttgtttaggtggtaggttggagttggaggaatcctcttcaggtacattttgcccatatttgaagtcgagttttattgactcctcagaggttatttcctgagattattctgtcagatatctttagagataggaagaacatcctttatccctctgttcctctaggaggtttcataccttaatttaaaacatttatcttcgttaaatatttgagtctgtatttcatcctattacactatttttgccttgctacgcttcttcctccactaccagttttttgtttttatatcttccaaatattcacatacaatgctcttttcaagtcttgctcttggatacattctgtacatccctaattgcatatttgctgtttcatcagtacttttattctactatgccatttaattaatcttttctggttcttctctagttggtctgtagccagtgttttagtgcctgaaattatgtacagtactccagatacagcaccatgaccttccatttatgttttgtgcacgtgcaggcagtatcacccttttggtctggtgaagcatatttaaaatttttgtctggcttatttcacagcaatataatgatttattttattttattttatttacttttatttactttatgagagtctcactctgttgcccaggctggagtgcagtggcgtagtctcagctcactgtaacctccacctgccaggttcaagcagttctcctgccttagcctctcgggtagctgggactacaggcaggcgccaccacgcctggctagtttttgtatttttagtagagacaaggttttactacgttggccaggctagtctcgaactcctgacctcaggtgatctgcctgcatcggcctcccaaagtactgggattacaggcatgagccaccacacacggcataatcactattttaagtcactattttaatctcttatttcttgagtgtaggcatgaaatttttactgagataattatagatttgcctgcaatactttgttggaactttgtactttgatggaaaacataagacagagttttccagacagagaatatagcataaacaaaatcatagacacaggaagttgtggaaaatattcaggaaacacaaaattctatttggctagattagtggttctagacctgggatttttgatgcaaaatatcaggagctttcaaaaagtactgatgcctgagcactactctaggagctcagctataattgatttaggtaggatgacagccctgggctagaacgtggggtgcaaacaaaaggaaggaagtctggaaaaataggtaggaaatcttgcatgccaggccaagaaaattgtggttaattcaagaggtagtgcaaaagatagagtgggtatcacatccactgttgagagatggtggatgtttgcgagagggcagttcacgtgatgagaggcatacctaaggaagagttatttggcaatattagtatctgtgttaaattagtatagtaaaatgattaagactgtagtaagtgaggctgattaggaggtattatcacagtacaggtgggaagtagagctacccagaactaaggtggtgagactggaaaggaagaggtgagtacaaaaagtactatataggtagaatctgtagaacctgaatattaaagaaagggagagagatgaatcagagatgactgaggttttaagcccagttgactgggagaattggggaagggtgttgcggctagttacagaaatagaggagtcagaaagaaaagctcatttgggaaaaagctaacaagctcatatttggagatactgagtttgggagtcagtgggcagactagatgaaggtgtccatcagatactaaatatgtacatcagaggttctcaaggctctctgttccagcctggaccatttctcagagacagaaagcaaatggccccaaactgctggcctttgggtatttaatgaattgtctaatgaaaggactatataactgttttgagttgtattgaggtactttgctaaaagtattgtgatgttgtaggatgcatacagtttataagaggattaaatctgtgaaatgtattaaacagacacctttgcaatataaaaacctattatttcactcatgtatctttgcttttcttttggtagagagatggaggaaaaagtcactctgcttaatgcacctacaaagagaccaaggtaatgttcaagagactcttaaaaactaatatatccgaaattacaaccagggggttctttcttgagtgtaggcattatttgatccgaggatactttggcatcctttcaggagccagcatctgcttaaatgtcagacagtcatttctaagaagaaagctataatttcaccctcacactaaagtggccatcattaccatgatgaatgtggaaaagtgtaggtgttatgggtcagactggaatctgatctggccaagctgtgatgaagccctgaggcaggaattgcaaagtctgctgtgatagagcacattgaaacaagttgtcgagaaagaacatactttctcataccataattggcagttcttctcagggaacagactggaagcatttttctttgatattgtttttaatgttaaatgttcctttgttctgggggttgttggcaggtcaagcactgtgactgaagcacccattgctgtagtaacatcacgaaccagtgaagtctatgtttggggtggtggaaaatccaccccccagaaactggatgttatcaagagtggctgtagtgcccggcaggtctgtgcagggaatacccactttgctgtggtcacagtggagaaggaactgtacacttgggtggtaagtgaacgctaagcattttggaacagtgctgtaagcctaattgtttactgggcccacgatgtctaagcattttattagttgaacctatactaagggagtggcaacatggggtgatggaatggaagctcttataagagcagggattttgtctgtttagttcactgatgtatgcccagggctggtacatattaggtcacctataaatgttttttgaatgaatgaatgagagagggagagaaaaattgaaagactcaggagactggggtttcccatttacagctggatgatttcagacaagtcactcaattactctgttatattaccatgaggttcagagcaactattacctgtgaaatagctttgtaaacaaaggaaggactataccatgtcaggaaacccctgaagcccacagcagtgattgaagatggctaggtatattttgtgtagaatttgtttgttgccctctagattctcccctctcaccttccttaacaaattgtctgtgtttgctgtctgtttccttatctcccactctctcttcattcacctacaatgcagcttccatctctgccactgccactcaattgaaactagtcttgacaaaatgacccataaattgctaaaataaaacagatgctttttagtccttacctagcttgacctctcggcagcatttgacatagttgaccactccctccttcttgaagctttgtctttacttgccttctgtgatagcatgttctcttggctttcctcctgtctcttgctatgcgttctcaggctcatttcaggctgctggagagaaattagtatcttaaacatttattggctgggcgtagtggctcacaactgaagtctcagcacttcgggaggccaaggcgagtggattgtttgaggccaggagtttgagaccagcctggcaaacatgacaaaaccccatctctactaaaaatacaaaagttagctgagagtggtggcgcatgcctgtgattccagctactcaggaggctgaggcatgagaatcacttgagcctgggaggtggagattgcaatgaaccaagattgcaccactgcactgcagcctgagtgacagagcaagaccttgtctcaaaaaaaaaaatatatatatatactgtcacacacacacacacgcacacgcacacacatatatatataaaatatgaggacttgtagtatactcatttaatagaattatttttctctataaaactgttgaaaaggccagacatggtggcttacacctgtaatctcaaaactttgggaggccgaggcgagtggatcacctgaggtcaggagttcgagaccagcctggccaacatggcaaaaccccatctttactaaacatacaaaaaattagccaggcgtggtggcgggcacctgtaatccctgctacttgggaggctgaggcaggagaatcgcttgaacccaggaggcagagcttgcagtgagctgagatcgagccactgcgctccagcctgggtgacaagagcgaaactctgtctcaaaaaaaaaaaaaaaagttgaaaagtcatcaaggactagtctcattgctgtatagcagcctctttgatgtagccagattctttataactcttccatgtttcagggaaactgtgaccaaaatttatgaaacttctagtacagattttcaagaagctatattcctgtagaaagcaacaaagttagactatattataaagaatttttttcaccatcacctgtaattaaatatatagtttaccttagacttgaaggacaaagattagattaatggatattaatctggatactttttaagttttctttacctgttggcaggatctgtatactacttgctattaaaatgtttaatccctttgcccatttttttctaatttctaaatttctagctctttttttctactgtttttcttcatatgaagttccattaaagatcagcttttggcatgaaaaattaaaacttcataagacctctcagccggggatggtggttcatgtctacaatcccagcactttgggaagccgaggcaggaggatcacttgagcccaggagttcaagaccagcttgggcaacatagcgagaacccatctctttaaaatttaagtttaataaaatgtaattaaaaaaaaaagtcataagacctctttatttcacagaacatgcaaggaggcactaaactccatggtcagctgggccatggagacaaagcctcctatcgacagccaaagcatgtggaaaagttgcaaggcaaagctatccgtcaggtgtcatgtggtgatgatttcactgtctgtgtgactggtaagccatcagcagaaagtgtcttaagtgcatttaatgtgggggtattttgcttaatgctgtgcaatcttagttgggattttaaaacaaaagacagtatacaaagaaccagaggaccttgagcaaatatactcattaataataacataccaaatttgctatagtattagggggtggtgagcaaggagaagacaggtgggtaacagagaagaggtgggatcaggagaaaatgtgtgtcgtggttggcaggaaaaataatcttaccacctcatcaggctatggataacacaaaattaggatcaagacctaagtttagttttggtcttgtcattacttagttaatgattccttgggacttatttttttatctatataacaaagatggccccattaaaattttaagtccttttaatgtgataatgctaccactttttaaattgtttaatatagtagtagtagtacacatgactctctgacatagaactctagacttgcacagtctgtccttttaatttcttggatataatcaattcatgtgagatcatttgctggggtagtcctcattccagccctgcccaactttctgattagataaaataagtcagtcctttgatggattctgttttcctttcttttgcagatgagggtcagctctatgccttcggatcagattattatggctgcatgggggtggacaaagttgctggccctgaagtgctagaacccatgcagctgaacttcttcctcagcaatccagtggagcaggtctcctgtggagataatcatgtggtggttctgacacgaaacaaggaagtctattcttggggctgtggcgaatatggtaggggtagccttgtctctgtccacttcttcacaggtatacaacctgacttcaaagttgtatgcatctaaacccatcatgcagcccctaaatgagaagtgttaattcagtaaatctttttttttttttttttttttttctcgagacagagtctctctctgtcacccaggctggagtgcaatggcatgatctgggctcattgcaaccaccacctcccgagttcgagtgattctcctgcctcagcctcccgagtagctgggattacaggcacacaccatcacacccagctaattttttgtatttttagtagagatggggtttcaccacactggccaggcttgtctcgctcgaacttctgacctcatgatccacctgcctcggcctcccaaagtgctgggattacaggtgtgagccaccgcacctggcaaaagagaatcttacagaacctattcactgggaaggaagccctcattataatgattttcattcttatgtgtgtttcaggacgactgggtttggattcagaagaggattattatacaccacaaaaggtaaaatcagaagcaacttatttctaaaacctatcttaagtcgcacagactccaataatatgtcctctttccttggctctgttgtatcaaggtgtttatttccgaagtgtttcctgtttgggagactgacaatttaggattcctgatttagcaccctgtggtcttgtcatctgaccaaatcacagaaaattgagaaagtggatacagcgactgtggacattgtgaagtcacatattactcagggatgacagctaaaatcagcgtgtacagcagaaaagtcacatatagctacaaataccctggaaaactcgagaagatactgtaaagcagtatactgtctcttaacccaacacagccattttcctctcctgtttctacagttgaccatcagatgaaatattaatagttgtttttgtttagcggtcatgttgcatgaaacatattatctaattactctcagccttgccagagctggccctgtgagaggctcacagaggctgataccagctgggggaaaagcacagtcacatctctcccacctaccctagggcacaggcttacccattggagggttggctaaatcagctataccatttattgttagcagtgttttgggttttctgttttcttttttttttttctttccttgggaacttttagccaaaccagtttttatttatattttaaaaattaaattattatgcatttctagggaccatcctcaatgggattcccagctgttccttttctcctggaaaggctgtggcagaaactgagggttgaggtttcaggttttacacacatccattgtgaccccacacatgcatcaccccaccttctccagtcctgtctagttagctgtaaaaagatatgagcatttggaagtcctagatattacctcagtactctgtcacctctcctataaaatgaccagattgggaccccacagggctactgaatttctgtaactgtcaagcagccttccatctcaaaggacaaaatcagcaatgaattgaagcttctttctcaactttttgacaggtcaccctaagtaggacctattactaagacaaactgagagggtgctgtcttgtttagttgacctggaactgtcaccttttctttgatattgtaaaacttgagctcttcgttgacaacagtagccttgaccgagcacaatggctcacgcctgtaatcccagcactttgggaggccgaggcgggcaaatcacttgaggtcaggagttcgagaccagcctggccaacatggtgaaaccctgtctctactaaaaacacaaaaattaactgggcatggtggcacacgcctttaatcccagctactcaagaggctgaggcaggagaatcgctttgaacctgggaggcagaggttgcagtgtgctgagatcataccactgcattccagcctgggcgacagagcaagactccacctcaaaaaaaaaaagaagaaaagaaaatagtagtctcagccaggcgtgatggctcacacctgtaatcccagcactttgggaggccaaggtgggtagatcacctgaggtcaggagttcgagaccagcctggcctacgtggcaaaacctcatctctaataaaaatacaaaaattagctgggtgtggtggcatgcacctgtcatcccagctatttgggaggctgagacaggagaagtcgcttgaacctgggaggcagagattgcggtgagctaagatcgcacgacttcactccagcctgggcaaaagagggaaactctatctcaaaaaaaaaaaaaaagaaaaagtagtctctaagacactgggcaaacctgaaaagaatagagcagtcctcactttcctgtagtcattctgctaaatgcagcatgtctcttttgaaagaatttgagagctttttttctaatacgaattatatatttgggatttctttttctgatttttttcttgcaggtggatgttcccaaggccttgattattgttgcagttcaatgtggctgtgatgggacatttctgttgacccagtcaggcaaagtgctggcctgtggactcaatgaattcaataagctgggtctgaatcagtgcatgtcgggaattatcaaccatgaagtgagtgtcctgattggtgttctaaccacatcatcagaatttctctaggttggaatttctttgagatgccattattggttagtgaccatggaatttgactttagttatggtctcataggcattgtgtgcagaaaaagaagccagccacaaagagtacatgctatatagctctatctgtgtaaaatttaagaacaggcaaaattaacttatactggcagaaatcaaaactgtggctacttattgaaggaggggtattaacagaagaggtggaagggatcctagagtaatgggaatggtctatatcttgatctgtaatggttttaccagtatatgtatatagaaaaatgtgtcaagctgtgtgatattttgcagtgtgttatacttcaacaaataaattgattacaaagaataaaatgatgaaattcagcttttaccttattgaaataggaacaagcaaattaatgttataaaaaaaaacatatttccatgcatcaccttcctggagtttttttgattgattggagttttttagatttctcccaaatcactgatcctgtttaggcttatcgaatgtaattaccattctgtcttcaaaaatgttagcaaattcaccactgatattgtcttagtttccttttttttttttttattatacttttaagttctagggtacatgtgcacaacgtgcaggtttgttacatatgtatacatacgccatgttggtgtgctgtacccattaactcgtcatttacattaggtatatcgcctaatgctatccctccccccttcccccaccctatgacaggccccggtgtgtgatgttccccttcctgtgtccaggtgttctcattgttcaattcccacctatgagtgagaacatgcggtgtttgattttttgtccttgcaatagtttactgagaatgatggtttccagattcatccatatccctacaaaggacattaactcatccttttttatggctgcgtcttagtttcctttttgtgttaatataatgagttttgtcattttccaaagaataaaattaagagacagaagttttctgactcaatgaaaaaggtaagaattaatttttaagcaatctctaaagtagtgattttcaattaggagagtacaaattcagggcaaggctggagagagtgtctttgtagtttgaaaagaaatattcagttgccgggcgcggtggctcacgcctgtaatcccggaactttgggaggctgaggcgggcggatcacgaggtcatgagatcaagaccatcctggctaacacggtgaaaccctgtctccactaaaaataccaaaaaaaaaaacagccaggtgtggtggcgggcaccggtagtcccagctacttgggaggctgaggcaggagaatggcgtgaacctgggaggcggggcttgcagtgagccgagaccgcgccactgcactccagcctgggtgacaaagcaagactccgtctcaaaacaaaacaaaataaaaaaacaaaaaaaacaatattcagaattactattacttgatttatgttttcattatagcagtggatttgttgtgaaattttaaacttaaatgagaggattcttttttaatactaattcaaagggaacatgagttttaattaagttgagaaacactaccctatagatgaaattagatcacagtaagctgattcctttatgggctggagacagtcctcaggactttaattctttgccctgcccttgttagatatgcagagtgtataaccaaggtaaatgtcaacgattctctccttatataaataccttctgggatggaaagttcatgttttataaaccctaagtcagaatctaaaactttggttgtcagaaagttctgcctcatgtgctgcattctctgattacatattcagcttatttcctcttgttttctgttggagatggaaaactacctggcaccctcttcttagtaatataacttacttgaaaggccttttggtcaccaggacttttttccattctcagcctgattttccttcgattttcttacctcatgcatctgctttgtgttttattttgtttcaggcataccatgaagttccctacacaacgtcctttaccttggccaaacagttgtccttttataagatccgtaccattgccccaggcaagactcacacagctgctattgatggtaagttgatttacaactgtatcacatgccttagtagctgagcctcttttattctatcaggtattaggttttctttatatgtatatcatcccgatttcccctgaaaatctagtattatttcattaatgtattcaggtacatatttttattgataattattataaatgcataataaatacatccttttatgagaacaccacacctatgattccagacatctgttgtctctgattagcaccttttataagtattctaaggtagtactcatttttctcactacaaatacagtactggagagagaatacaatatcgagtcgctgactggatctaattggttatagtgcctagatactgtatttgtcctaggtccaggatcatgtggctagttttatatttgtatattctaacaaccggaagctaatccatgaagtctgcttggctgcatcttctctgggttccaggactcatttgtgccttgttatttctttttgcttctctctcagagcgaggccggctgctgacctttggctgcaacaagtgtgggcagctgggcgttgggaactacaagaagcgtctgggaatcaacctgttggggggaccccttggtgggaagcaagtgatcagggtctcctgcggtgatgagtttaccattgctgccactgatggtgagtctgtacatatcatttcaagctttctggacacatggctgtgtttcagttcttggctgggaaagaaatggactagttatttgtatagctgaattgtggatgtacttttttatttgtattaaattggtggccggttatatatattgagctttattaacttttcatgtgttcaacatagtgattgtttttaaaggccagatttctagataatgataggttaatgttctacattcctccttttttcatttcagctttcacttttttggtaaaatgttataagaattattaagtacttctatataacttgcccagtatcttgttgattgatttcagtaaacattgattgggtagctggagagaacagcatattttctctgttggctggggtcacctgtactgcagtgatgtccatagggactgctaaggtttgaagggctgctttccgctatattatgtatctctcagatttctgagttggtctaattgatttttctcctctcttttctctgagacgatttttttgtttgtttgttttgttttttgaaacagagtttcgctcttgttgcccaggctggagtgcaatggcgcaatctcggctcatcacagcctctgcctcccaggttcaagcgattctcctgcctcagcctcccgagtagctgggattacaggcatgcgccaccatactcggctaatttctgtatttttagtagagacggggtttctttatgttggtcagctggtctcgaactcccaacctcaggtgatccgcttgcctcagcctcccaaagtgctgagattacaggcgtgagccattgtgcctggccttttttttttttttttttttttttttttttttttttttgagatggagtcttgctctattgcccagcctagagtacaatggcgcgatcttggctcactgcaacctccacctcccgggttcaagtgattcttgtgcctcagcctcctgagtagctggaactacaggcacaaaccaccacgtccagctaatttttgtatttttagtacagacagggtttcaccatgttagccaggctggtctcgaactcctgacctcgtgatctgcccacctcggcctgccagagtgctgggattacaggtgtgagccactgcacctggtcctctgtggctatttctttccgcagtattgtctggttcctcactcctcttctttttttttttttttttgagacacaatctcactgttgtcgcccaggctggagtgcagtggcgcgatctcagctcactgcaactaccgcctcctaggttcaagcgattctcctgccttagcctcctgagtagctgggattacaggcactcgccaccatgcccagctaatttttgtatttttagtagagatggggttttgccctgttagccagactggtcttgaactcctgacctcagatgatccacccgccttggcctccgaaagtgctgggattataggcgtgagccaccactcctggtcactccttctcttctgtactgctgctgttgctatcctacattcccttccttctttgcttgcttttttcctcttttttctttttcctgtgtcatcatctgaacttctaaatttttgtagccacttttttcacttgactggtaacaactcacatttcattttctctctttttctttttgagacagagtctcgctctgtcacccaggctggagtacagtggtatgatctcggctcagtgcagcctccacctcccgggttcaagtgcttctcctgcctcagcctcccaagtagctggaattacaggcgtgtgccaccatgcccagccaatacatttaatcttcttatcttttgactcatcaacttttttgttgttgcttgtgctctgagatatccttgttttcttttggtccatgcctgttctgtactcatgaggggtctcagggatattgtgatctgttaccatatttaaataaaccagcattcagaacagcacattaactctctctgcttgtcccaaaataagggactttaaggagcaaactgtttaggtcagacttggataaatggaaacgttacacaggacagtcaggatgtcactgaagataaatttagtgcagcaactgcagtagcactttctgacagggcttcagagagctcatgtttcttgaatagatctgtgtagttcatgactttaacttcagaatgaggaatgtaaatttggattctgtggctgggcatattacctcttgatgttcctatactcctctgaactgtacttgatggcctcattcatgtccaagtcctcttttaggctctaggaatatagaaatgagtctcagaaaactcctgctttcaaggagctcacactctagtagaataggggactagcacaggcaggtgttaggtgctataatagcagcagcctagtcttctaagtcctggagtaccccaaggctcacttgtctctccaaagtgagctcgttcccttaaattccccctatacattgactgctttatatcaccaggcttgaccttcagactcatttattcaacagctcctcaacttgatgtctaaatttagggtgggccatataacccagttatcttagaccaatcctgattcatgccttcatgcctgttgtcctggcttaatgattaatagccaccctgtttcatttttttttaaaagcctgatttggataagaagttataggcatctcagacaaacttagtatactcaaaatcaaacttctgattttctgcccagatctgtacctcctgcagccttcctgtctcagtaaatggcaacttcctcctacactccacatcccatccatattggttatcttcagaataaatccaaccacttctcaccatctccactacaactggtctccctgcttccatccttgctcccctgccatcagttctcctcagtagacagagggattctcttaaataactactgctcaaaacctccagtggtttcctctatcagtcagtaagtgccagagtcatcacagtggcccgactggccctatgtgagcaggacctcagccacctcctgaccccttctgttattccgtcccttcctttactttgttctagctgcaggggtctccttgttccttgtttgtgctgctgacattacttttgctgttgctcttctctctgcctggaaactcttcgtcactccagtagatctctgttcaagtgtcagaactcctctgacctaccctatctaaaataatgatatcccaccccactgttactctttgtttccacttatttttctccaccatttatcttcatagcatttatcaccaccttaaatattaggtgtatatttattattatcagtctcccctactagaatgtcagttccacagggcaaggacttggttttgttcactgctctatcaccccatgcagtacctgtcatgaaatagatgttcagtcactgtttgaatgaatgaccaataaaaagttgttgaagaaaaaggtgaatgattggatgaatgaatgagtgaatggcagtacataggaagagtgggcatttttacccaagtggaatcaggaagagtttaagctttatataggagaataaacagctttcccttgtttagtacatagtgggaagtctttctagctctaggatataaagatggggaacccggagaattgggaagccagtgttctgttaaatggtctactgtttaacttttttcctagataatcacatttttgcctggggcaatggtggtaatggccgcctggcaatgacccccacagagagaccacatggctctgatatctgtacctcatggcctcggcctatttttggatctctgcatcatgtcccggacctgtcttgccgtggatggcataccattctcatcgttggtaagagtttcatatgtctggggttgggatggctttgacagaggatggacccacatctgagtactgttagtcacattgttggaaacagaaatgtcctgaagaagccatttctgtaagtcttgtaatggtcaaggatgccatgcctagtggtgggaacagaacattgtcatttcctggagctttgctatctgccatctcttgattattttttaatataagtttgggctctgcctgcccccttagaattgatttttttggttgtttttttttgtcttttttttgagttggagtttcactcttttcgcccaggctggagtgctatggtgtgatctcagctcactgcaacctccgcctcttgggttcaagcaaattctcttgcctcagcctcccaagtagcttggactataggtgcctaccaccacgcctgactaatttttgtatttttggtagagatggggttccaccacgttggccaggctggtctagaactcctgacctcaggtgatccacctgcctcagcctcccaaagtgctgggattacaggcatgagccaccgtgcctggccctagaatttgttacttctaatcatccaccaattaatttgttgtctgtgctcatgctttcatgagaaacattcagtacatcctttaaaagaaactttaaattataagcactttctgcataaagattactttgttaggaactactttataaatgcctgtgtaagggtttataagtctacttttagatcagtggtttgcaaccttagcagcacatacattagaatccttgagaagctttttttttttttttttttttgagacgaagtctcgctctgtcgcccaggctggagcgcagtggtgcgatctcagctcactgcatcctcccaggttcaagcgattctcctgcctcagtctctcgagtagctgggactacaggagtgtaccatcacacctggctaatttttggattttttagtagagatggggtttcaccatattagccaggctggtcttgaactcctgacctcatgatctgcctgcctcggcctcccaaagtgctgagattacagacatgagccactgaacccggccaagaagcttttaagaataccacggtccagaccctatccctgaccaattaaatcagaatctctggggtggaacctacagacctatgcaatgttacttcctttttttaaattttgagacagagtctcactctgttacccagagtagagtgcagtggcacagacacagctcactgtagtttcgctctcccaggctcaattgatcctctcacctgagcctcccaagtagctgggactacaggccagtgccaccacacctggctagctttgcatttttttttagagattgggttttgccatgttgcctaggctggtctcaaacacatggttactttttaaaacttcccaggtgattccagtgaccagccaaggcagacagttgctaatgtagatagtgaatatacttagaatagcaagtggtgcttagcttatgatactaatttctaaaactgtaagttatagttctaaagttatctggagtcaaggagagcaattatctccctatcctagtcttctctcatttttcttgcctatatcagtatacagtgcttacctaccaaatattttttctcagagaaagtattgaattctaagaccatccgttccaatagcagtggcttatccattggaactggtaagtaccaatgtttcaggtaccagtggttttctgaagtgtgggtcttttggttagattccatgtagactccaaaacccaaaggaaaatgggaaatgtctttgggaagtgaggaatacagtggttaagagagaagatcatattttgtttggttttgcagtaagttataacttttacattgtggtcagagagacactacatcagctttgcctccaacgcatatgcaagtaattaagtagcttgcccagtactgtaatatgacttatgtattattcctttccttactattctagggggtaatgagtcctctacttccacggtattcccaggggtattccagtctaaagaaatagttcaccaaaacaggcactcagaataaaactcggctaaactttcagtgtggttaggagaatcatcccaaagatctctgatagatttcctttgactgctgtcttcatggttctctattattggggaccatgctaggaaattgaatctattttcctttttggttttctacctgctagagtccctgtagtctttgatgtctcagaaccaggattctgatttattttatttatttattttttttgaggcacagtcttgctctgtcatccaggctggagtgcaatggcgcaatctcggctcactgcatcctctgcctcccaggttcaagtggttcaccttcctcagcctcccaagtagctgggattacaggcatgcaccaccacactcagctattttttgtatttttagtaggtttggccaggctggtctcaaactcctggcctcaagtgatctgcccacctcagcctcccaaagtgctgggattacaggcatgagccaccatgcccagcccagattctgatattgtttggaatcaaaacacataaacacccagaataaaagcagattaaagctgggcacagtggcacagccgttagtcccaggtactcaggaagctgagtcaggaggattacttgaggccaggagttcaaggttacagtgcactatcatcatgcctatgaatagccactgcaatccggcctgggcaacatagcaagaccctatctcgaataaatgaataaatacataaacaatcggtcaatcaaacagattaaacctccaaaaagaaacagctgaaaacatgatctagacttgttgaacttcagtttacacatatacactgacttattacaccatattatatatagttaagtagcccattgcttggcatctctgtttatgtatattaatatctgtcaaaactgactgaagatctttcgctaagcacagcagttctactacaagtttgttttactagaacagtatttaaaggaaaaacataaaattaaaagcaaatgtccattggtgggaagatgtaaactcgaggaagagcagggatttttgtcttttttatttatcaattttatctacttccctagaacagtgcctggcaaatggtaaatgctcagtaactatttgttgattaaatgcgttataaccatccattggagtgaaagtgaacatctccaaatatttccataatgtgaaatgtaaaaagcaagttgcagcagactacatgcctttttataaagtttagaaacaagtaaaataggctgggtgtggtggctcacgcctgtaacaccagcactttgggaggccaaggcaggcagatcacaaggtcaggagattgagagtatcgtggccaacatggtgaaaccctgtctctactaaaatacaaaaaaaaattagccaggcatggtggtgcacacctgtagtcccagctacttgggaggctgaggcaggggaatcacttgaacctgggaggcaggggttgcagtgagccacgattgcgccactgtacggccagcctggcgaaagagtgagactccatctcaaaaaaaataaataaaagtaaaatgaatagtaatgtattatttaaggatacataaaggcgataaagtttttaagaagaaatgataaatataaaattaaacagaatggtttcatctgggtaggaggccagagaaggaaggaattcacacggcaaatacagtgatataggtaatgctctagttcagcagtgtccagtagatctttttgcaacaatggaaatgttccatatcggtgctgttcagtatagtagctaccagctttctgtggctattgagcactccagagagtggcttgtgtgactgaggaactgaatttttaattctctttaagtttaagcgggcacatatggctagtaactcatattggatagtgcaattctagttctagtggcaaatagacctatgtttattgttaggcatgaaaatttacacgtatgttaaaatagtcttaggtatatctaaaatgcagcataatcttaaaaagccatttaaaacaaaaagtaagcttcagaactcactttggtaactatagttctgctgcttccgtaggatctcagcatgacccagttagtccccaggccagcacagcaggtgataattaacccttctttacatttagcctcagaaaataccaggcatcagaacaaggatccctgaggagtaagagaaaaaaaaaaagaaaataccaggcaatttttctttaactttgacagattaatcttcttaattatatttttatttggcccatattaaaattcagtttcatttcctgaccacacatcagctagtcttcattaaggttgcttggaatatgctgtatgatatgaaagaatcagccattatattataaaaatggatacagatagtcgtcagagaatgtaatattcacattaaattttgaagaattggccgggcgcagtggctgacgcctgtaatcccagcactttgggaggccgaggcgggtggatcacttgaggtcaggaattcaaggccagcctggccaacatggtgaaaccctgtctttactgaaaatacaaaaattagccaggcatggtggcgggcacctgtaatcccagctactcaggaggctgaggcacgagaatcacttgaagccaggaggcggaggttgcagtgagccaagatcgtgccactgcactctagcctggatgacagaatgaaactgtgcctcaaaaaaaaaaaaattgctgggtgcagtggctcacgcctgtaatcccagcactttgggaggccaaggtaggtggatcacctgagttcgagaccagcctggccaacatagtgaaaccccgcctctactaaaaatacaaaacttagctgggcatggtggtgtgtgcctgtaatcccagctactcgggaggctgagacaggagaattgcttgaacctgggaggcagaggttgcagtgagccaagatcgggccactgcactccagcctgagcaacagaagctagactcggtctcaaataaaaaaaaaaaagttgaagaattcaacattcagattttccccggacagggagttaatggtaagtttatctggcaactttaagaggagtttggctcaaatattaaagacctttttatataagataagtgtctatggaggatgctggaatctgaatgtatctcttaaagaagcagagtaagcatgggtgctagatttggtgggctgtggttggggggattgtttggtaatgcttttagaatattgataacctgctatggatacaagataaacaaagttggtaaatggaagtgaattatcattatgagcatcctgatatacaaatacaactatacaaaattacaaaacatagtttgtatgaaaaccaaaaatttagtccctaacatttgacttgcactgttgccattgcacttcatgcagcttataggcacctttccagggtaagtagggttgtcaaatggtaaatctgtcttgctgcatagcaaagctgtctatttctgtgctgtatatctgtcagtgtttcagagctctagcccgggaggaggcggcgggggcggcggtggtgaagaagaggacagtcagcaggaatctgaaactcctgacccaagtggaggcttccgaggaacaatggaagcagaccgaggaatggaaggtttaatcagtcccacagaggccatggggaacagtaatggggccagcagctcctgtcctggctggcttcgaaaggtaattcctttggaagaagtaacttggataaaatatgtggccctttgcaggaactagaaagagctgtcagggtctctcagttttccaagtacctagtaaactgttgtgcatcctgaatccagccttctgatttctacctggaaagaaattgcctaatcactaatccttttttctttccaaaaagataaaaaatgttctcatacccttgttacttaagtgaatgtattataagttactataacctaccttgatggcagtttttgtagtacatgtatataaagattaagcttacagattttatactgtcatttatagaaatggaatattggagcagttggaatgccttacaataggaaaatggttgatgaaagttgagatacagaaagtaaaaatgttggattgggcacagtggctcatgcctataattccagcactttgggaggctgaggcaggaggatcacttgagcctaggagctcaagaccagcttgggcaacacagcaagaccttgtctgtaccaaaaatttaaaaaattagccgggtgtagtagtgtgcacctatagttccagctactcaggaggctgaggcaggatgatcacttgaacctgggaagtcgaggctgaagtgagccgagctgtgccatgattgtaccactgcaatccagcctgggtgacaaagcaaaaccctgttcaaaaaaaaaaaaaagtaagaatgttgaagtatatttattttcatggaaagttactcacaacatatggctatgcagaagaggatgatatatctgtatgatctcattcttttaggaaatatgtaacacacaaaagaatgtcaacaagactatgtattgacagtttttaaagtggttgtctgtaagtgatggaattgctggtgaattttattagtttcctttgcccatttgtattttctcattttctacagtaaatatttatggtttgtgaaattttaaattttttaccaaaaaaaaaaaaaaaaagaccgagcatgatggctcccagctgtaattccagcactttgggaggccaaggcaggaggattgcttgagcccaggagtttgagaccagcctagacaacatagggagaccccatctctataaaaattaaaaaaaaaataaggccagggccaggcatggtggctcacatctgtaatcccagctctttgggaggccaaggcgggaggatcacctgaggtcaggagtttgagaacagcctggccaatcatggtgaaaccccatctctactaaaaatacaaaaattagccgggcaaggtggctcacgcctgtaatcccagcactttgggaggctgaggcgggcggatcacaaggtcaagaggtcaagaccatcctggccaacatggtgaaaccccatctctattaaaaatacaaaaattagccgggcgttgtggcgcacgcctgtagtcccagctgctcaggaggctgaggcaggagaatcgcttgaacccaggaggtggaggttgcagtgagccgagattgcgccactgcactttggcctggtgacagagcgagactctgtctcaaaaaaaaaaaaaaaattagctgggcatggtggcacgcacctgtaatcccggctacctgggaggctgagccaggagaatcacttgagcccaggaggcgaaggttgcagtgagccgagatcgcaccactgcagtccagcctgggcgacagagtgagactccatctcaaaaaataaatagataaataaataaggctgggcgaggtggctcacacctgtaatcccagcactttgggaggccaaggcgggcagatcacttgaggtcaggagtttgaaaccagcctggccaacatggtgaaactctgtctctactaaaaatacaaaaaattagccagttgtggtggtacacgcttgtaatcccagctacttgggaggctgaagtaggaggaccacttgaacctgggaggtgaaggttgcagtgagccgagattgtgccactgcacttcagcctggtgacagagtgagattctgtctcaaaaaaataataattagccgggcatggtggcacatgcctgtggtcctagctactcaggaggctgatgtggaaggattatttgagtcccaaaggtcaggactacagtgagtcatggttgtgccactgcactccagcctgggcaacagagcaagaccctgtttcaaaaaaaaaaatctgtaggtttaaagctccctgtctaataagactaaacttgctagtgatttgaggagcgtgaacagaggaagcagcatgctgttctgtctgcacctttagcctcagctttcagcagtgttgcagccagcctcactgacacttccttggagcgccccagctcactgaatagcctgtgtagaataagcgtgttggagtgacacaccagaaactccagcctgtgttctttgagtttgcctttgcatcactgtttctctgatgaaggggtggcagttttttcacaggtaggctgtgatatgttgttaaccacaactgtcttgcccactagagggtgctgaagtcatgagagagggaaaactatagcaaaaagaagggaatttgggaggaagcaaatactgcaaacagactaatgagattctttctcatatacataggagctggaaaatgcagaatttatccccatgcctgacagcccatctcctctcagtgcagcgttttcagaatctgagaaagataccctgccctatgaagagctgcaaggactcaaagtggcctctgaagctcctttggaacacaaaccccaagtagaagcctcggtaactgagctttttgcctttgaatcacaactaggtaaacagtcactgcaagctctgcctggttcttctggcctcgctctagcttttgggtttcagctgccctgcatcaactcattatactgtctattcagcagtacttaaagcctcaacccaagactaaactgagttgcctcagaaaggtatttacccttccacatttctgacaggctaacacctttctaaagggattgtcttttccctctgcctcagaaataccaaaattcaaattcagtttttcatgacactggcagggtaggttagaggctctaaatataagaaagaagtaatactggtagtctagtgaggaagcaacacatgtacacctaaccttggtaaaaatgacattgtggtaaatacctcagtaaaactataatccaaggtcatgaaactttttctataaaaggctacataattattttagacttttcctattaaaggccacatagtaattattttagaccattttagacagaaatgtgtacagcctcttttgcaactactcaactctgacattgtagcacaaaaagcagcttcaagtaatacataatgaatgggcatccttgtgttccaataaaattgtatttacaaaaacaggcagtgggccagaattggcctatgggctatttgttgaaccctcctataaaaaaagtacagtagaaaagagaaaaatccagactaggatcatcagaaagcttcccagaagaggtaataatacctttgaaacttcaaggtgaatgttttaatttctctgtcagttcaccttcttaaattgtgttggtggtcctgtttactgaccacctctcagatcttttctaaagtgtgattcactgcatatcatgaatattgaccctttgggtctgtgatctgaaagacttgttccaaaccaaatcatgcttttccctacttcagcattttaaatgagaagataccaaggtgctttaaaatttttcacaaagtcctccaaaatagatgattggtctcccaccttggcctaatggggactgaggcagagagttcactttccatgttatgtcagtgcccatcgctgttataatcctagcatttctgtttctcgtacatatattcatgtgtatatatgatttatcttgttaatttaaaagtaaaatccgattgcacttagaggaagtttggattgaggagctatgacacctgggcagaacctcctgcaatctccttcttgtctctctagtcacctcggctgaatcctgcagtaacctgtgctgggaagggaacaccactgactcctcctgcgtgtgcgtgcagctctctgcaggtggaggttgagagattgcagggtctggtgttaaagtgtctggctgaacaacagaagctacagcaagaaaacctccagatttttacccaactgcagaagttgaacaagaaattagaaggagggcagcaggtgagagcattaaaagaataatccaatttctaagcctgttttgaagaatcacagaaacaaaacacgaagtactgaaatagacttgttcctttgcaggtccttactttttttttgagacggagtctcgctctgttgccaggccagagtgcagtggtgctatcttggcttactgcaacctccgcctcccggattcaagcaattctcctgcctcagcctcccgagtagctgggactacaggtgtgcaccaccatgcccggctaattttggtatttttagtagagacagggtttcaccgtgttggccaggatggtctcgatcacttgacttcatgatccacccgcctcagcctcccaaagtgctgggattacaggtgtgagccaccacgcctggccgatccttagtttttaatgataccatttttgtaattataatcccagaagccttgggccttgttcaggcacctagattgaatcattttcatcacttgcattgctttttcttagtgtatgttttttcttttacaatacttaattacatacctctgaaaatagacattctcctgaacaaccacaatactataaccacacctaaaaaaattaatactagtattgtcaattctcatctagtatccagctgatacctcaattttcccagttttcccccacaaaaatgtcctttataaccattttttatcagactagaatccagtcaagaatcccacattatatgtatgtctcatttcttttcatctaaaacagctccctccaccaccatcaccttttttaaattattttatttttatttttatttttatttttatttttattttttgagacagtctcactctgttgcccaggctggagtgcagtggcgtgatctcggcttactgcaacctccaccgcccgggttcaagtgattcttctgcctcagcctcccgagtagctgggactatagacgcttaccaccatgcccagccaatttttgtatttttagtagagatgggatttcaccatattggccaggctggtgtcaaactcctgacctcgtgatccacctgcctcggcctcccagagtgctaggattacaggtgtgagccactgcgccaggccttatttatgtatttattttgagacagggtcttgcattgtcaccaaggctggagtgcagtggcacaaacatggatcactgcagccttgacttcctaagctcaagtgattctctgacctcagccccccaagtagctggaactacaggcatgttccaccatgctctgcttcaccttttaaaaaaatacttttatgacattgacttgttgaagaaaccagggcagttgttcaacagaatgtcccacattctagatttgtcttgttttctcagggtgttgtctaacttgtttttctgtcaccctgtcttttctgaaaactggaagtttaacctaaggcttgattagattcacattaaacatttttagtgaaaatacttcaaaggtgatgctgcttgcattatttttcgagagccatgctattgttttatatagagggaagtagaagcagagaaatagggttaggcccttggctttgccatttgccagctgtaggtgtttgggctactttgttttctctgagccctggtttctcacctgaaagaaaataatagacaccttgtatggttctttggaggattaaatgaactaatgtttatgaaattactttagaaaataatatacaggctgagcacggtggctcacacctgtaatcccagcactttgggagattgcttgagcccaggagttcaagaccagcctgggcaacctggtgaaaccccatctctaccaaaaataaaaactaactgggcatgatggcacacgcctatagtcccagttattcaggaggctgaggtgggaagatcacctgaatctggggaggtcaaggctgcagtgatccgtgatcacaccactgcacttcggcgtaagcaacagagcaagaccctgtctcaaaaacacacacacacacaaggtaagattggcagctatagcagggagaagattgttttgcccaggactttttccattttaaaactaagagttctgcatcccaggaaaccccgcagtcctggacaaacctggatagttggtcaccctacctgcagtaaatataaaggtatggactgtatctaaaatagtgccatgagcgtctcacaagatcgtggctacaaatccttagccacgccttagccaatgccttagaagttggcattgaaaatatagtactgaactactgctgtgactaggtggcactgttgctaatgtggaaccgtgttttatccggacaggtggggatgcattccaaaggaactcagacagcaaaggaagagatggaaatggatccaaagcctgacttagattcagattcctggtgcctcctgggaacagactcctgtagacccagcctctagtctcctgagcctatagagcccccaggagactgggacccaaagaacttcacagcacacttaccgaatgcagagagcagctttcctggctttgttcacttgcagaaaaggagcgcaaggcagaggctctgaagcactttccttgtacatttggagagtggcattgccttttagataggatctaggagtgattttattgttttggagaatggaagggcccccatggccctggctttgtcatcagtgactgccatagcaacagcagctctgtacctcatctgttgatcccacctttgaagaggagacacagtgctcaccttaattgcgctggtagcagcttatatcccatgtatcattttcaccattgattggaagctgccttgggaattcagtaccaggcattacccctctgggtgggagagggagaagtgtaaagttggagtgggctggaatcaggtgtggcccgcccagtgtcctctgcagagtggtgaagtagtctggccctcttgggagccctgagtccaggaaaatatgtctgatggagtcaatctagggcttgtttcgaaaaagttcagttactctgtgcagctaaatgctttaggaggaaaggtaggcttaggttgcttttcctctgagggttgattgaaatttcttcagtgaggaatagagaaagggcaggaccctcctcatcacacagctggtgtttcaggctgtgaccaatgcagggtgggatttcctaactgtggatgaggggatgaggtgtctctgagggatgaggtgtctcagagaattgagtccatggggcagtcagaatagccttaagagaaaatcatgaaggagaagaggtcctcctttagctgcctctacttggtatcttagagagggcttagagggctctcagtcttctgcccatgaaaagacttctttgagcctctgccttcatggctcttagggttctgatcttgatatcagcagccccaaccactttctttctgaatgtctagtcagtatttttccccttttggtgttttatgaagccatgtggtaacgaatgaatctgtatcatttttcctacctgagtggcccaaagccagcaccaaaccctgggagtccctgaagcctaacagaacaggtagaacttgcaaaaggaatttggctgagagctcacttctaatcctgtactcactgtgtctttgtagatagaaacaagctagctttaccaaagagaaatagtgtcatagaagaacaaaacttcatatagaaagttctaggcaagtatttgatggtttccttaaggatgtgagctttgtatttccacctagccttgtaaaatgttcctgtggtattttgtgtcacacatcctacctttgatgagtctcacatcccaccttcctataaacagctaaattaattttgtttcatcttccccagaccaaaatgtttgataatcttatcaacattgtgggaggtcttgtgcaatggaaattttgccatttctccaaaactggtggcataaaggctgatgcttggggagaaccccattgctcgggacaggcaactctgttcaatgggatcttctttggtttgatgttcccattgttttctcagttctgggaagcctagtacattagtactaatgtaatcactgaaaccttttcttgaaataagggaagcagccaaactttgattaaagttgcaagttctggggacttgcgggggttgtcataaactgtaacagtgggttttggttcagcatgtaaatgcaactttgattttcttgaggaccgattgacctgtcatgtccctgtatcctcatgctcatcatctcagcaggcctgagaggctgggtcagtttgggtgttcatcatgaggattgcttctgccatggagctgatggacatgggcaggttgctgagaaggtggggtgaaagtgagtgccgggggtgggtgagtgccctggtcttgttcataggggagcctttccctagcagtggaacgctgtggtcattttctctagcatattcccttgggaagtctagatttgctattaatctggctgagaatctaagttctgtgccttagagacagtttgcactttcccatattgtgcctgggacagccatatgattttttttcccaccaaacaagtatgcaaacagaaaccagttcaaagggggatggagtaaaagatgaggcagtagaaatgcctttgaatggttttctgtagctaattctctttaaattttgtcctgctttttttctttatgcagtgctaggtgttttaagttttctagtagtattgcttttgagttacagtataacctgagttactcctctgctctaacattgttgcagaagaactagtttattgttagccaggttgcttgaaaggttgagagtggagtggtttggcatttctgttttaaataaacatttaagctcttaatcagta

SEQ ID NO: 938 - DNA, 133 bp, Homo sapiens
agaacaatccattctttaatattatacacagtctgaactgcacaggggtcccttctcacatgattttgagaaagatcattggtaaagagtagacataagttgatctttaggacagtaatcttatccttttagg

SEQ ID NO: 939 - DNA, 295 bp, Homo sapiens
agacgcagtggctcacgcctgtaatcccagcactttgggaggccgaggcgggcggatcacgaggtcaggagatcgagaccatcctggctaacacagtgaaatcccgtctctactaaaaatacaaaaaaattagctgggtgttgtggcaggtgcctgtagtcccagctactctggaggctgaggcaggagaatggcgtgaacccaggaggcggagtttgcagtgagctgagattgcgccacggtactccagcctgggcgacagagtgagactccatctcaaaaataaaaaaaaaaa

SEQ ID NO: 940 - DNA, 266 bp, Homo sapiens
tcacgcctgtaatcccagcactttgggaggccgaggcgggcggatcacgaggtcaggagatcgagaccatcctggctaacacagtgaaatcccgtctctactaaaaatacaaaaaaattagctgggtgttgtggcaggtgcctgtagtcccagctactctggaggctgaggcaggagaatggcgtgaacccaggaggcggagtttgcagtgagctgagattgcgccacggtactccagcctgggcgacagagtgagactccatctc

SEQ ID NO: 941 - DNA, 133 bp, Homo sapiens
agaacaatccattctttaatattatacacagtctgaactgcacaggggtcccttctcacgtgattttgagaaagatcattggtaaagagtagacataagttgatctttaggacagtaatcttatccttttagg

SEQ ID NO: 942 - DNA, 490 bp, Homo sapiens
ctttaatgaaggtgctaatggtttctaacattgctattaatagcataaatttgtatatgttaagtactgaagcattttaaaatctattatcttatgtgactcttataataatcctatgaagcagggcaaataataattgcatttcacagctatttacagagaacataaatgatttccccaagtctgcagttagcaagcaactaggaccagatccagagtttctcaataaccggtccattaattcccagatgttaaccaacagggcaatgctggcccataacaaatgaaaaaacaaggatagaataaagaagtatcaggacaaataacttcaattcttttattgaagagactgcaactttactgcattttgggatttaaaatactctttgttagactccttactgccttaacggactacgttgatgttggaagcacccatcatcccgaacacagataaatgtaggataaaatataacaggaacatttgaaa

SEQ ID NO: 943 - DNA, 556 bp, Homo sapiens
cacatttaaagcttttaaagctcccttttgagatgatttcttagggtactaaaatatcacctgccccagagtttacaaatcagaaattgaatgaggcaggcttaaagaggatcagaaaacaagataccaaataagagcagccattgtaaaactagagaaggttacgaaatggccctgcttttctataaggaaggtcgaagacaccaggccccttgccctgggtttgtctggtggaagtttaaggaaagttcataccctgggcccagtagagagctttgccttcataattgtctgcatatgatttgacaaacataagacctcagtgttcctagatcgtttatccccctcagcaatgtgctaaatatgaagtaaaaggttaccaaagggaggatagggaagaaaacctaattaccaatcctggtaattttaaacatgagaagatttataaacaacggcttcttcatacacttgtgagttctgacatgttgtgaaaataggacctgctaagccattgaaaggattttcaatatattgtacgagatggaaagaggaccca

SEQ ID NO: 944 - DNA, 383 bp, Homo sapiens
ctcagaaaggttttatgacttgtgggtgcctttgtggtacttcacatgagcgggaggtcttaagactatggaccccttgggagaccagtgtctaattctactacttcctcctccccaagaattcagatggtgaaacaccctcatccctccagccctgcccccaggaaacccttcattcagaaaggtcatttcatttcctgtgagccagtcttacatcactggtgcaagaattgggcagtgcttgcccagctggaaggtgagacattggaggcctcagcctggtgtcccagacagtatttgtcaggctgatgataagctggtggagagtctgttaactcaaggcctgattctaatgaatttgggattccttgctgaaaaaaaga

SEQ ID NO: 945 - DNA, 539 bp, Homo sapiens
cccggaaataacaatccgagtaatgacccttcgcctgtaggaattcgcagccagaaatcgggaagccagggttccaggcatgaccccaccgcttgctgttaggatcaggtgtctcttcttctctggattgcactttccccagatgactatttctggcttccagagttattgcagctcagctggaaagacaaatgtaaccgcgttttgtgaactctggtagtctaaaggattgttgctattgcaaacgcaaagcattttgatagtcccgtgccgtcttgatcttttattaccctttacctttcctcaaaaagccatattctgagctgtcaccaaaattgtcttatttaagactcacaacgacctcgtgagacgacaaattgtacccattctaggaaggaaaaagaaactaagtcttcgagtggagaagcggcttgcttcatttagtaaatattaagcaccaaccgtgagacaggcagtgtacttaagtgctagaaatagaaccgtgatcaagattggcaaggtcctgtgctgtgggagct

SEQ ID NO: 946 - DNA, 117 bp, Homo sapiens
ggtcttcaaacatgccattgaatctccttgatgatcttccctcacctctttaactgtttgtctccgtttttatttcagatttcagcttaaccatcacttcctcagaggacggcttcc

SEQ ID NO: 947 - DNA, 502 bp, Homo sapiens
tctcgttctatcagcagaatttggcacaattgatttcaagcatttggtacaattaatctctctttctaccttgaaacattttcttcacttggagttttagacagcacgctcttcaggtttttcctctctggatgttctttttcatgcttttttgaaaacaattttattaccgcctcccaggtctgctccctctctgtgacttctaaacagtagagtgattcctcagggatcagtctttgaatgttctattctcactcccggaatgatcttccatggctttaaattccacctataagctagtgacttctagtttgtatctactgctcagactttgaattctaactccaaactccttccttgtcaatttgacttcaatgtttaataggcatcccaaatttaccaaaaatgtactcctgaaatgcctcataaacttggttttttaaacaatcttctcaatctctttcttccagattcccaagtcagtatcttagatttgcctttg

SEQ ID NO: 948 - DNA, 561 bp, Homo sapiens
ctttgaaacaattgccaagtagcagaaatttttccaatgttcctactggcatccaggtaggcaggaacagggtatgggtcaattgctatttcagtcaattacagcagaggagatagggtctaagggacatttcactcctaatgttttaagtttggcagctgtggtataggtgtttgctaatagtgaataataaagcataatataaataggacagaaaagtccagtgagatttttgtcccttcctaaaggaattttgtcttagcagtgggagtcaacagcattactgtcttgcttgccaagttggtatactgcccatctgtgtatatcagttcatctacatgtaactgaaaatgtacatttcactttcagcctgctcaaaaatgttttatttatttcaatgtgctataataaaaatggatttgtatagatggcattgaatttttattatacttcccaatgaaaatgccagttattaaaaatagaaatttaagaaattacatttgaatgtgagaatacattttagtattcttttaaattcagatagaaaaattttttttttca

SEQ ID NO: 949 - DNA, 561 bp, Homo sapiens; identical to SEQ ID NO: 948

SEQ ID NO: 950 - DNA, 6604 bp, Homo sapiens
agggatccaagtgaaggcgaagccagtggcagaaccgacacctcaaggtgaggagccactattaatacttcgctgctaggtccctgtgtatgaaaacgtacttttgaaatacttacagcacttaatgatcatgaatagatctaataactagatagcatgcgtattttagatttttatattggggtgggttttcataatgttacctagcattcaagtcagtcaactttaagtttgttttccaaacatgcatttgaattgtgtacttggtatagaaataggctttctgttctataaagtatgtcaagctaaagaattaatagattaaatgtactgatatttttctcactaaagtaatgtaactaaaattagtctgagtcaaatagcacaaataacacagaacagggagataattacatgtaggaagatttgatattagtaatatattttaggtgataattcagtgtttgaccacatttaaaaattctatccaggcatacttttggggatttctttttttgacatttcatgctagttgtatattcattctggcaatgggtttcatacttgagcacaatcagaattacagggaaggcttgataaaaaggttgctggatcccactcccagggtttctgattcaggggccgaggcaggtgcctgtgcatttgcatttctatcaagtccccaggagatgcttatgctgctgttctagggaccacattatggacatgttagtacttgtgttcatattttacaaacgggaaatttaagaaatgaagacattaatttattttgagtgtacccaagcattaagggatgcaatgtaaattttacaaccaacaagtattccacagtatgaaaggctctggcttcattcaggaacgattgtgaccagctgaacacaaacctccaatttgatttctacttttcaagttacttaaaatataaaacataattaactttggaaaactatagcattcccatgtagtctttttaacaaactgtgctatatttacatttagtaataatagttgaaatgtttctttgtagagttaggtacctgagtcaccacagtagggagccacaggggagcaagacaaatattcttcactttcttctgccttttatagaaacatggaggacttgttcttagcctctccctcacttagtcttcacttttgagcccctccttgcatttcatcctatatttccactaaatttccctctgagacatttagtagtgtgtggcattgcaagtggcccttaatagttgcatttttgtccttttaatgtaactatataattttattacattataagaattagtaactgatattttataaatgtttacacaatacttttcacattcccttttgtttggttgttgttgggtttggttctatttttgcttttgaactgacttattgaatactaactataaagtactttctgatcatttaattttcacaacaactaggtgaaaatgcctattttacagatgaaaaaaaacagcaaggaacataggtgggatcaagccagctataataaggttctgtcatttcagggagatgaggtgatactgtggttagaagtataggttctcagccagagtgcatgggtttcagctatgttccaccacttaccttactgtgtggctttggggaagttacttcaactctgcgtgcctccatttcctcactctaactgcctcatagggttgttctgaggggtaaatgagtaattaatacattttaggcacttaggacaattcctgcacctagtaagtactcaataaatgttagctgttattatattaatatccacatttccaggagctttctacaatggacattatcagtggtaatgtctgtgagaccatgcagaaaaatatttcattgtcttaaggtcatcttaaggtggaatagaaggaaactagacttagaataatatccctaaattctagtcttcacttttcaactcattagctctataacttcagaaaactaatttttttttttcttctgagacaaagttttgctctgttgcctaggctggagtgcagtggcacgatctcagctcactgcaacctccacctcccaggttcaagcaattctgcctcagcctcccaagtagctgggattacaggcgcttgccaccacacctggctaatttttgtatttttagtagagacgaggtttcaccatggtggccaggctggtctcaaactcctgagctcatggtcctgccaccttggcctcccaaagtgctgagattacaggtgtgagccacagaaaactaattttaagttttccagccatcagttccatctttaaaatgagtgctcagtcaactgatctctcaggacccttccaggatgccgattccaccagaattatacatgtgaccttggtaaatgactctggttggcttgcaagccctaagaggcctgtgatgcaatggcttagattcagtgggcaaaaagagaaaaatagagaacacgatgaagtaaatactttccatacttattaatggtctttggaaatttattttctctacgtattcctttccttattttctcaagattgcatagtttgcagagctttggggactcagatacctaggctcagacacctggaaatgaagtagataatatatataaaattacacatgaatatatatcatactattgatacaaaatgtatatatattaatttaaaagatgtatgcagtagattataaactcctttcaagggactttttttttcttaaatcacataagtgagataggttaacaagttgcaattataacatctctatttggataattgttcaagaaatttaattacaggattttctgtatcacgaataatctattaactttgatgaagctatgaaggtttctttctatgactgtttgaaataggctttttgtttccatattacttgggggatgcctgcaataagtaaaattcagtgagatttagtcatttaacaaatatgttaattattactatgtacccagcacagttctagatgcccgagatatatcagtgaatgaaatagacaaaattccttgccctcctggagtttacagtctaatggtagattcagacaacaccctaacaaatgggttaaataatatgttagaatgtgtaagtgctatcaagaaaaataaagcaggctaagggggcttggccatgctaggataggagttagggtacaatatgagcaaagatttgaaaaaagcaaaggagttagcgtcgcagccatctggggagaagcattcatgacagagggaacagtctgtgcaacagccttgtggcaagaacataacccgtgtgttcaaggagcagcatggaggccattgtgttctgataggagtgaggaaggagaaaaattctaggaaatgggattgggggtagtaggagttggaatggaagtcatggggaacgttgtagactgttttaaggatgtctttagtgaaatgagaagtcactggaggacattgagatgtgtggtataatctaacatctttacctaattgcagtacaacattctttctcaaccttaccaggtaaacgaattatctttccctctgaagttacgacattcctcctatccaaaaaggcagaaaaaagaaattttttatatttcaaaaatgtatatttacaaatagaatattagtggttcctattttgtgtgtgtgcttgaacagagaaatatggaactgaagaaggtattaagttcttcactttcagttgcagacttgtttccctcaaaccacttatatttaagaaaaatgctattttagattgacaatattaaaagtcaaaacagatggcatcttggggtgtgtttctgtaacagcaagataacataaatctttgcgtccatctgagggtggtctgcaaattaggtagtgttattaggcactgaactatgaccacttagattttatgtgtgttttgatctctttgctgagtgaaatatttgctttcattctttccctttgccctcttgttccagaagtacatcaggggaaccaaaagaaagagacaaggaagagggtaaagattctaagccgcgttctttgcggttcacatggagtatgaagaccactagttcaatggaccctaatgacatgatgagagaaatccgaaaagtgttagatgcaaataactgtgattatgagcaaaaagagagatttttgcttttctgtgtccatggagacgctagacaggatagcctcgtgcagtgggagatggaagtctgcaagttgccacgactgtcacttaatggggttcgcttcaagcgaatatctgggacatctattgcctttaagaacattgcatcaaaaatagcaaatgagcttaagctgtaaagaagtccaaatttacaggttcagggaagatacatacatatatgaggtacagtttttgaatgtactggtaatgcctaatgtggtctgcctgtgaatctccccatgtagaatttgcccttaatgcaataaggttatacatagttatgaactgtaaaattaaagtcagtatgaactataataaatatctgtagcttaaaaagtaggttcacatgtacaggtaagtatattgtgtatttctgttcattttctgttcatagagttgtataataaaacatgattgcttaaaaacttgtatagttgtctagatttctgcacctgaatgtatgtttgatgctttgatttgaaaatgttcttccctgttatttacattctggtgggtttttaaaattcttacctccatcatgcaattttgaaaattgtgtccagaattaaaagtgcatagaaatagcctttacaattgtagcatggacctttaaaaattgttttaaaatcttatttaaatttaaaccagaagctgaaaaatagatcagctttattatacacaaaattattactgcttatctttgctcttttccttgttatcccgcaaggtttagttgagaagatacaaaatgtttacagtgttggcacttagagtttttaaattcaagtacatgaaattcagtaatagcattgccttgagctaactaggaagtaccgggaaaaaagttaaatctacatcaagtttcttttgaactttgaagtgttttctgacccactgctaactgtagcaacaaaatttaaaagaaaaaaaacatactttatctggctattataacataaactgtcacgtaggtttgctgccttcagaataccgcaatttaattgcgggaatataataatattgggactgtttcacagcacaaactcatctttacagtgttgatcaatgcatcagttaagaaataatgccacctcaggaattaactggcattgggaacatttgcctcattctcctgctatcctcttcattcacccctgccactgtaatatctataagtacttaagagacttgtgagcaaaacatactatttataacagtatatgattgatttatgcttatgtggttgttcagtttgttcccatgtaactcgtttgttttaaatattttgccagatttcttgtatttattccacatcattatgcctataatgtgccgctttgtgattgggcatttgcctacttttctttcataattagtgatatatgcgatgtaaaaccactagtaaaggtacattttaatacttgttattttatactgaattagccttggaggttgactgtgcaatgttatttactgttgtaattactgtaataccaacatatgggccccatctgcacactcctgaaaaacagaaagtgtattcaaattttatcagtttaaagaaaataaagctgtgataaatactgtaattccaacctacattagaaggtctaagtgtaggtgatgtgccattccataatggcttccagactagggtgaattttatgttctgtactgtactgtgatgtagctttcttctgtaacagttatgttttaaaattaagtgagttttttttttgccttagcaaagggtggtgtttgaaaaaaaaaatgtgtagcccctttttaacctagtgttcattcaaaaaaaaattgatgcaaatctttattcactttcactggtgcacactgaaattttacttgaacagttctcataataaagcacttgtcttttgctctttatcagaatgtgaattacctgttttctggtacaaaagtattctgtatgaggagtttattgtatgtgttctaaatttagttggcaaagggtgaagctgtgaaggttttcaagattattgaaactatgaaggtttcttgtcattatgacaagaaagtttaatctttttataggaattcctgtcactgaaatacgtttttaaaaaaatagactcatgtgttttccacggtagaaactgatatttttttacattttctcactgtggccaactcttctgtgtttgtagaaaggaatttgacttcaatatcttttatgaactaaaaatgaaatcttgatactcactttagatttttcattttatgtgttcatgacaacataaatatttttcaaagatttagaggaattttgcaatgtgtttgcataaataaataccagtttatgttcaccggctatgtgataccagga

SEQ ID NO: 951 - DNA, 6604 bp, Homo sapiens; identical to SEQ ID NO: 950

SEQ ID NO: 952 - DNA, 389 bp, Homo sapiens
  misc_feature (34): n equals a,t,g, or c
tttcagattcccttgcctgtcccccaacctctanatattagaatgccccagagctcagtctatggacacatttttttctctggttttccttacactcttggtgatctcagtcaggctcatgacattagattccgtcctgtatgaacaactcctaactgtatctctagcgcacatctttctgctgaactgcagactcatatccaactgctgctcagcctctccacttagatacgttatagactctgaaacagaacatgttcaaaagtaaactctcgttcctcttcccaaacctgtccctccctcattcttcaccgtgttagaaattggcagccttgtccttacagttgctcagaccataagccttggagttatccttgacacttcttttc

SEQ ID NO: 953 - DNA, 390 bp, Homo sapiens
ttttcagattcccttgcctttcccccaacctctaaatattagaatgccccagagctcagtctttggacacatttttttctctggttttccttacactcttggtgatctcagtcaggctcatgacattagattccgtcctgtatgaacaactcctaactgtatctctagcgcacatctttctgctgaactgcagactcatatccaactgctgctcagcctctccacttagatacgttatagactctgaaacagaacatgttcaaaagtaaactctcgttcctcttcccaaacctgtccctccctcattcttcaccgtgttagaaattggcagccttgtccttacagttgctcagaccataagccttggagttatccttgacacttcttttc

SEQ ID NO: 954 - DNA, 459 bp, Homo sapiens
atggtctgtacaatatgtcaagaagagtattcagaagctcccaatgaaatggttatatgtgacaagtgtggccaaggtaaccattgatttcttttaatcttgttacatactgaatgactatgttgaagattaatgactaaaaatactttacattgataatttgaaattatcctttttattaattatattaatgtaggaaataatgctaaaatgcattcttgaaattgtgttgaaagtattaatgaaaccgaatttgctttatgctttttttgatattaaggatatcatcagttgtgtcacacacctcatattgattgcagtgtgattgattcagatgaaaaatggctctgtcggcagtgtgtttttgcaacaacaacaaaggtatattttaagtgttttgggctaaagctctgatggaatttgtaagacattatcaacataatgattgtgtacactgaa

SEQ ID NO: 955 - DNA, 10448 bp, Homo sapiens
agagactctacaggggcaggtaattcactggtccacaagcggtctcctttacgtcgaaaccaaaagaccccaacatccttgaccaagctgtctttacaggatggacataaagccaaaaagccagcatgtaaatttgaagagggtcaggatgtcctagctagatggtcagatggcttgttttatcttggcactatcaaaaaggcaagttactttaatgtatcttttgctgtttttgcagtaagcatttaataatcttaaatttaacttcatgtttttaattttaagagatcaccgttaagtatttctctgtattgcagataaacatattgaaacagagctgcttcatcatatttgaagacagttctaaatcctgggttctctggaaggacattcaaacaggcaggtgctactatttctcttgaacatgatttaaattaaaatttgattttcttcaacttgtcatattatgatgttgtctgttgaatacagtgtatttagataactcagtattacttccgaggagaggttaaaaaatcagcatagtcgttattatagaccataagaagaacaagaatactctagaggacagatgcatcactaatttatacctgtaagctatgttaagacccttctaagaactttgaagaaaaatctttagtaactaatctcagtaacggtttgggattcaattcaactgttgcttgcttatatttgtagaaagcaagtgtttattgggagcatactgtttgtcagatgatttgggaaattaggacatataaaactgatttagaataatagaaatattcgttaataagaatggtttaaaattaccatttagttatgggttttttatgtttaaatgggaaaatgaggctatatttgtgtgccaataaaaatgaatgaaagtatgccttggtttggttataggtatgcttcttgtgatgatttctattattagaaaccatgattgtttcatgcttttagcatctgctaaatatagatgttttaccaggtacctctttcatgcaaagtacttttaaaaattacaatctctactaaaagcctgagtattttagctgttcattaaagccctacttttggttttccttttgctgggttaataggcctacactaagacccgtgttttgtgtattctcatagaaaagagataaattttctccctaaagggtagacaccttgccaaagtatttaacaattgggttttatatttgaataccaagttcaattttatggtaggtttctgccatgttttagttcttgactttactcttaatgtttcttaaagaataaaaaaagttttggtaaaggaattggaatgttctaattaccatctgtatagttggtactcagggcttaggtggggaactaagtagcttttactctggtaaaatgtttttctggagaaactttttatggttcctggactgataagtttaaaggactaaaattacattttgaatctgaaattgaggagccagagaaaagtgtgactcataagatttaaagggataggagatctccaacactactaatattgagcagatcttactaccctgcacacaaaattattcttttttccttattttgtaaacataggtctctctgtaatagcagtgaaacatgttatgctgctttttactccccttccattagctatgtgtttctttcagcttttgaagatcttttggagtttcctgtggatttaatgtaataggtctgtctgtccttttgtctacttcctcctttctacttctcctctgcttttaaaagtggtagaaaagaagaaaaccaatgttacatagagatagaaagttgttgtgtgaggggttctataagtcctgcactcagtatgtcagtttaatgttctgtggttgttctttcttcactggttccttttgctgttcttggaattacaaaggattgctcctggtcatttaactcttcttagcaccctgatattagcacatatgaaacttatagttgctataaaaatgaataaatgaatctgaaacctgcgttatggcatatttcagtgaggagtgggtttagtagttttcttccctgtaagaaatctgccaataatgtatatcaaaacttaataaattatatttgtctaatgagtttcttttaaaaattttacataaaaatattagtagtcaacagggtgaaatatatcatgttacaactattacataaatgtaagagggttttgaatcttagcatctaatgctgttttggtttctgtgaaatgatatactcttgcattgctggtggcagtgtaaatttctattttggtggtttagcatttgcattaaatgcagaagtttataattatctaatagactcctttctagcagtttattcataagaagtaattcaaaaaatactaggtgaaaaatgtttcctgaagtttattttaacaacaacaaaaaatttggtatttctaagatgaaatggccaaggctttctagtcaattggatttagagtaaaggagactatagaagattactaagctatataggaaggttcttgtaaacttgatggtaaaaaatatatacatatatgtttgatttcacaagtaaaagttaattcccagctttctcaggattgtttcttgggtcactacccccttttctgaggaattgccttccccatcattagtccaggtagttacagtgagagtcaggtcaggcacctcccctcgcggggctgtcgttccatttccagggaattgtaaattttcacagagagttcccaggcttaatctggttgctctcctgatcggaaccataaacccagaagctatgggagaccaccttcaacgaagtgtaccaagaagcaaacagctgggcgcagtgccttatgtctgcaatcccagtgctttgggaggcccaggcaggaggattgcttgagcccaggaatttgagaccagcttgggcaacacagggagatcctgtcgctacaaaaaaaaaaaaaaaaaataggcatggtgacacacacgcctgtggttccagttacttgggaggctgaggtgggagcattgcttgggcttgggaagtcaaggctgcagtgagctgtggctgtgccactgcactccagcctggatgacacagcaagaccctatctgaggggaaaaataaaaggaagcaaacaaagcagaagagagaggatgagagaccagaacaaacaaataaatagcagaaatacaaaagacagatttctccccctccaaaaaaagaaaaacagttggtaacctgtatgtccgagagtagagtaataatgaagtaaattgggttatttccactagatgtaatactatgcagctattagaagttacaattttgaaatgaaaaatgattttcattttcaattttgagtgaaaaatgcttttgatagaagaaatattacatagtattgatgaagcatctcgtagtggagagaacatggattttggcacatctggatttgaatcctagtcttgatgttttctcagggtctttgggttagttactttgtctgagcctcagttcttctctataaatagtatatttataagttagttgtagaattaaacaaaatatatcaagatcctacacagtgcttggcccatagcacaaaattataagtttttattgttgttatgtatataaaggctgtgtattgtgaatttgactctgctgaaacagacaagatgagaatactggaaatgataatgtgttagggtggtaaattgtattagaaattttgtgtgattttttttttttgagaataaaaatgtctcaggaagaaatgcttcacttgttctgctaaaaaaaaattaataattttgggacccccaaattttgttgaaatgatattttgttagggtacattattggataccatattttcagatttcagaagctagagattaaataattggtgttcaacctgtttaataaattagtaagtaaaaggaaatgctctgaattgagcgagaaagaggtagtttacttatcttccttactttttttctttaatttcatggtattagtggtgtaggataagtgaatgtatgtacatgaatagataagtattctataaagtagctctagtgttcacaaaccttctctatctgctgtcgcccatccctcatctccaccttcacctttaagagtgggaatatgagaaatgagtaataagggaagatgctcaagagcaatttaaattatgccttctgccaaaaagcagattaaattatgaaagtaggcatgttaagttaaaggtagaaagaacacagagagcagagagataccattcgtgtactttgtcttgtgaagcattatgatgtacttagcaaacattgcgcatatgtgctgctcactgagtcataaaagtggttttgttttatggaattttttatgactctcttttttaatgtgttgtaaatattttaggagccactggaagtggggaaatggtctgtacaatatgtcaagaagagtattcagaagctcccaatgaaatggttatatgtgacaagtgtggccaaggtaaccattgatttcttttaatcttgttacatactgaatgactatgttgaagattaatgactaaaaatactttacattgataatttgaaattatcctttttattaattatattaatgtaggaaataatgctaaaatgcattcttgaaattgtgttgaaagtattaatgaaaccgaatttgctttatgctttttttgatattaaggatatcatcagttgtgtcacacacctcatattgattccagtgtgattgattcagatgaaaaatggctctgtcggcagtgtgtttttgcaacaacaacaaaggtatattttaagtgttttgggctaaagctctgatggaatttgtaagacattatcaacataatgattgtgtacactgaaagtttgttggaatgaaatgagcaatgaatgctgggtagaaagaggtgctatttatttgactaatgatgcttaagtgactttttaatgatgctttcacttatttgatgatagtaatacgggaattggtgcagtaatttgaaagaagaaaagaaaaatagagattattattaatcagacagtttgtgatatggtaaaagtttggaaaggaaatttctccagaagtgtcagagtcgtttttaaagtatagaattgtgtttaaaattttagctttcactctttcacatttttttccctctaatgtagaggggtggtgcacttaagaaaggaccaaatgccaaagcattgcaagtcatgaagcagacattaccctatagtgtggcagaccttgaatgggatgcaggtcataaaaccaatgtccagcagtgttactgctattgtggaggccctggagagtaagtaaatacagttatgtaattccctttaagtaatttttatttacttatctatttttcttgattatggtgtgtgagtgatggtgaattgcaactgcatgaacacatcagtgaagaaaaccagggggaaaatctattattttcataaaaaaataattttcatctagtttttgatcatatccacacattaaaatatttgtataagtcttatattctggaaatttaaagtgaattataaatattgtcataaaattaactattgagggaaaacatttactgcaggggcccagtatcagtagtttcattggatgtcatatttaatgtgattgaccatttagaaactggtatatttaatattataatttaaatgggagagtaaaagacaagttttttaagacataaaatcaacatggaactttttcacagatagattactgctttcttctacgtattttcatttctttcttaaagtgatagggcacagattgtagtgcagtgacatgatcatagctcactgcagcactgaacttctgggctcaagttatcctcctgcctcagcctccgaagtagctaggaccacagacacgtgccactacacctggctaattttaaaaagtattttttttttgtaaagacaggttcttgctaccttggcctcccaaagctggctgggtttacaggcctgagccatgctggcctggagtagcatttttattttcttccagaactttttctttgcatatacagtttggccagctgtttggtgcaagaggcctagcttttggcctatcttggcttttgacataccttcctaacgtttgatttaaatttagagacttgtgactcttcctttcatttgaacacttagaggccattgtaagattttttttttttttttttttgagacaggttcttgctctgttgcctcggctggagtgcagtggcatggttatagctcactccagcattgaactgggctcaagcaatcctcccatctcagcctcctgagtaggtaggaccacaggcatgcgccaccacaccctgctagttttttaagtttttttgtggaaatggagtcttgctatttgtccacgttggtctccaactcttggcctcaagtgattctcctgctttggcctcccaaagtgctggaaatacaagcatgatcaccacgcctggcccccactgtaagattattaattagcctaatttcaatattgtgtctcagggaataggaagcttgaggagagggagagggatggggactggctggttgatagtagtcagaacacatgcaacatttagtgattaagtttgccatcttaggtgggcacggtttttggtggcccaaaatagttatagtagtaacatcaaagatcactgatcaccatgaaagatacaatattaataataatgaaaaagtttgaaatattatgggaatttccaaaatgtgacacagagacataaggtgagcacatgaacctagaaaaatagtgctaatagactgaatcaaggtatagctctgtttggaaatggtgccttttattattttccgataaagataaccgtatcaaagtttggaaatggtgccttttattattttcaaataaagataaccatatcaaaaccacatactagctgggtgtggtggtgtgtacctgtactgccagatacttgggaggctgaggtgggaggatcctttgaaccctgaagtccagcttggtcaatgtagcaatgtagccctgtctcttaaaacaaacccaaaatccatgtgctaactgaaaagagaagatatatttcttagatgaagattcaattttagcatctttagctttctcaaacagatctatagaccatacattgaaatatagctaaacctgtcaaaaagcctttatacctggtagagtcttagattagatttatgataatgttaagcaggtttattaaatcgttatattctttttattatagctgacaagaataatagaaacacagtaaagatatgaagtggaatgtttataatctgaaagctgcctaaggccatttgatatttggggcaaacaacagtacctctgaatctgacctctcctggggtttagagagttgatgtgaaaaaaagcccagaggcctggcatggtggctctcgcatgtgatcccagcattttgggaggccgaggacagaggatcacctgggcccaggaattggagaccagctctggcaacacagggagacctcagttttacttaaaaaaaaaatttgcctagcttggtggtgcatgcctgtggtcctagctacttgggaggctgaggtgggagggtcacttgaactgggaggttgaggctgcatgagccatggtcatgctgctgcactccagcctggacaacatagcaatacttgcctctttaaaaaaaaatagcctaggcttgtgttttaacagagctcatttgactagtgtaggagccaggcatttttgactagaagtagtagtgtatctttcaagagcttataaaatttcatgaataaaagagagaagagggatgaaatagctgatactataagcctttttgggaaaggaaatatttacagtaagtatagtagaaatgtgatgctttaattagaacagtattgtggattaggccacttttttttttttttttttaaagaaatgaacctttcccttaagacaggaattttagtgttaacttttttgttttttttaatagctggtatttgaagatgctacagtgctgcaaatgtaagcagtggtttcatgaggcttgtgtgcaatgccttcaaaagccaatgctatttggagacaggtgagaagggcatttgaactttactggctgatttttgtcactttttaattgtggttatatttgtgatttcagatttcctaaagatagtttcaacagtgatttggaaaggggttgtctcagagggaaaatattaaataatatacttaaaatatacgtaatttttgtgcttttggattttattccagaatgcttttaagtattatcagtgattacatttgctcctattgacccatagtactctaaagtattctcattggtaccttcctttaaagaacctcaaagggatagtattagaattggaaaagaccacagggccttgttaaagacacaactatactttagatatgaaaaatttgtaaaagcagacttaatgtactttctatattagaagaatgcagggtagcacagtgagctccaggaacaaaaagctagaccactaagtttgacatctgaaaacctggttttaaaaatcttggcttatgccacttaattttctttctgaccttagggaagttcacttgtctctttcgggcttattatgttattttgagcgttgaattaaactatgtatgtgggggcagccatcacaattcctggcacacacaagcgattagtaaactataagtacgtgtgagtctgtgtgtgaactttgaaggtctccaatggttaaaaacaaagatcctttctcttcacatatgaactgtttcattatttgttattggaaaagaacttccttcaatcacagaaagcattataatttaaattatattttgttttgagtatcagtctttatatcagctgtaggttattcacttggtgaatattagctataattgttagtttatctctgatgactcagtataaaactttttcttttttttttttttcttagattttatacgtttatatgctctgtctgcagttctggaccagaatacctcaaacgtctaccattacagtggtaagtgtggacctttctgttaaaagaaagaaaagccattttcttaaacctacaagttgaaactttctatatacatttacttggcttaagtaaaaataggttatttatgcttggctttatttcttttatttatcctcatgcctgatgtcatcttcactaagtaacatccacttgtattgctaaattaataaggctgttcagtgttgaatgttataaatgaaactttcagatatcctttagacctaaattcttactcatatttctagttcttttgaacattcagaataccatacagtagaagagagataggtataacaaatatgctaatttctgcttcaatgtagtaattcttgtgtgttggaagtgtgatgaattttagaggtttactaataaaatgcttacagtaagtacttacaaatctttgttgtattttacatattttatcaacagataggatttaacccatgaatcaaatagtttggttaagtatggtatattctgtagcttatatccggaagtgaaaacacaaaaatcttgattttaagttatatttttttaaagccagaccctctttgaatgcacttgaagaagtaatttgtggccaggtgcggtggctttcgcctgtaatcccagcactttgggaggccgaggtgggtggatctcctgaggtctggagtttaagaccagcctggccaacacggtgaaaccacgtttctactaaaaatacaaaaaaatttagcctagcgtggtggtgggcgcctgtaatcccagctactcgggaggctgagggaggctgaggcaggagaatcgcttgaacccacggggcggaagttgcagtgagctgacgttgtgccattgtactactccagcctgggcaatcagcgaaactctgtctccaagaaaaaaaaaaaaaaaaaaaaagaagtaattcatatatcttctagtttatagttgctattcagaataagtgaatgtttagtcactattttctagttatttttatgtgtagtgatttattgtattgtgaatatgactatccacctaaatatttctctttgcattttaattactgttttataaggaaaccgtgattttttaacagtaaccaaaaacattgttttgtgtatttgattattttcggattccagggtagatatagcacacctatgcctttacaacctaagtgttattcataagaagaaatactttgattctgaacttgagcttatgacatacattaatgaaaactgggatagattgcaccctggagaggtaggt

SEQ ID NO: 956 - DNA, 160 bp, Homo sapiens
tttcttctaagttttctataaacttagagatataaccaacattcttccttcctctcttgttggtactcctttatatatttctgacttgtaggaatggtgggatctaataatattgttagaaaaatgagttgtagagtgaagctgcctgaatagaaaatta

SEQ ID NO: 957 - DNA, 121 bp, Homo sapiens
ttttttagtagacacagggtttcaccatgttggccaggctggtcttgaactcctggcctcaggtgatccacccgcctcagcctcccaaagagctgggattacaggcatgagccaccgcacc

SEQ ID NO: 958 - DNA, 4792 bp, Homo sapiens
gaaggtattgaatggggaaggcctttagtaagtgctctaaccttactcgacatctgagaattcaccactggtgaaaagccctataactgtaaggaatgtgggaaggcttttagtagtggctcggatctcattcgtcatcagggaattcatactgataaataataaaaattaaagcccctgtcaccttcctcatatttaaaccaaaaatcatgtctaatagttaccctcttccgtagttttttttaaaactttgtatttaaattttgtatccaaatgtatttcattccaggttataaattcggagtctaaagtgacattccctctctcccccagtcatataccgatgccagctgttctataattctttcattcattgttttgttctactttcttggtgacacattatactcatgtttatatttgcttgtgtttttagagctatcttttctgatctgtgtatttgtgtttgcaccagtatcacactgtttgaattgtgtgacctttaatatttttaaattccttgtggaggtttaactttgtttttgaagttagtgttagtctttttgttttattttattattattattatatgttttttgagacggagtttcactctgttgcccaggctggagtgcagtggcgcaatctcggctcgctgcaacctccacctcccggcttcaagcaattctcctgcctcagactcctgagtagctgggatcacaggcgtgtgccaccacaccctgctaattttctatttttagtagagacagggtttctccatgttggtcaggatagtcttgaactcctgacctcaggtgatccacctgcctcagcctcccaaagtgctgggattacaggcatgagcgattgcacctggctttattttttgttgagacggagtttcgctcttgttgcctaggctggagtgcaatggtgcaatctcggctcgtcacaaccttcgcctcccaggttcaagtggttcttctgcctcagccttttgagtagttgggattacaggcatgtgccacaacacccggctaattttttgtatttttagtagagacgggtttcaccatgttagccaggatggtctcaatctcccgacttcaggtgatccacccgcctcggcctccgaaagtgctgggattacaggcgtgagccactgcggccggtctttttattttacaaatgtacatttttaattgttaagccaaaatcacaaagcaaaaaattacaaactaaaaagccaaaattaattgtaatcatacttatagatggctgctctcaatttggtagagaaaatcgtgctatactttgcttttttaagaaagtgtaattatgatatgcatgctgtacccttaactgcttttatcatgccaaagatttcatgagtgccatttcagtaaatatagatttttattattttcatgacatatttaatgactttaaaatgactattcccattatggttgccactaaatttttgcagctataaaagctgacctcggctgggcacagtggctcatgcctgtaatcccagcactttgggaggccgaggtgggcggatcacaaggtctgaagattacacgcatcctggctaacagtgaaaccccgtctctacttagctgggcgtggtggcatgtacctgtaatcccagctactcgggaggctgagacaggagaattgcttgaacctgggaggcggaggttgcagtgagctgagatgtgccactgcactccagcctgggggacagagtgagattccgtctcaaaaaaacacaaaaactgctgacctcattggatgcttatttttacttttaaaacatttattttaattgctaaaattatctacattttctccttgtgagctgttttgttcccttacatcaatcctaatcccaatgccatactagaaagtaacactgttatgaaagtgttatttatcaatccagatattaattttttgtttgtttgtttttttttttttttgagatggagttcactctgttgcccaggctgaagtgcagtggcacaatctcagttcaccacaactgctgcctcccgggttcaagcgattctcctgcctcagccttcctagtatctgagactacaggcgcacgacaccatgcctggctaatttttgtatttttagtagagacagggtttcactatgttggccaggctggtcttgaactcttgaccttgtgatccacccacctcggcctcccaaagttcggggattacaggtgtgagccactgtgcccagtcaattattttttcttatagctattagtggtgtttttgttttttgagacacagtctcgctctgttgcccaggctggagggcagtggtgcaatctcggctcactgcaacctctgcctcccgagttcaagtgagtcttccgcctcagcctcccgagtagctgggactacaggcgcgcgccaccatgcctagctaatttttgtattattagtagagatggggtttcaccatattggccaggctgctctcaaactcctgacctcgtgatcctcctgccttggcttcccaaagtgctgggattataggtgtgagcaccgcccctggctgttagtggtattttaaaaaattatgtctaggcatctataataaggctgtatgtattggattgctgtgaagagtcaatgaattaataaatgcaaagtacctcaaactgttatcacataatacaggtttagtaaaagttttccactattatcagtgatatactcattatcataagtatcttcattaggatttatggaaaggattttaaccatgttgtttacctttggcaaatttgtaattcatggtggaaaaagagaaacacttgtaatgagtataacgaagcctttccctatcattattattcagtgtggaattttaaaaggaagagaaaaagtatgtgtgcatagtctttgttcagactttatcttttatgctacataaagaataccagtctgaggctgggcgcggtggctcacacctgtaatcctagcactttgggaggccaaggtgggtggatcacttgaggtcaggagctcgagaccagcctggccaacatggtgaaaccccgtctctactaaaaatacaaaaaaaacaaaaacaaaaacaaatagccaggcatggtgttgcatgcctgtaatcctagctactcaagaggctgaggtgggaggattgcttgaacctgggagttggaggttatagtgagctgagattgcaccactgcacactccagactgggtgacagagcgagactctgtcttacaaaataaaaaataaacggttaccaatctgaaaccctgaaaatatgatgagtagtagaaagcacagctgtcaaaaaagcaggaagagattataaaattttttctaatatttccccccaaaatgcagaaaacatactggcaacattatttgaccagaagaagcagtacaataggataaccatcaaatatctgattattaattcaatattccctcttaattaacatgggttaaggaataaatccgctaatatatacattatttaaatgtacatgaaaatgaaaacaattgaaaaacctgtgagtggcagtaaaagttgtattggaagttttataacctaatatttgtgcatatattgtaatactaggaagaaaaaatatagaacccaaggaactaaaacaagctgaaatgaattgtgggaggaaggaggtagtattattttaaaaggcagaaataattgaaagaaaaaaactggatctgaatccaaaattgatatttgatggaagagaaaaaaaatgagacaaagtttagtgattccagaggtgaaataaggatgacaaataaacaatattgtatatgagaaattgaaatggctatatatgtaaacttaaaagaactgtgtcatttggggtaatgaaaatgtggcatgggtaaaggttgtacaattttgtttatatactacaggtcactcaactatacactttaaaagggtgaatattatgctgtgtgaatttgatctcaatttaaaaacttaaggctgggtgcagtggctcatgcctgtaattccagcactttgggaggctgaggtaggagaatggcttgaggccaggagttcaagaccagtctaggtaacataatgagatccccctcccctcatctctacagaaaaaaaaaaaaattaaaacaacaaacttaaaagttggtattatagacatttttataatatatctgaaaatctggaaaaagtctgtgatttttaataagttgacgacatcagaattaactggaggtgtaaaatcttaatagacctccctccagaataaacttatttaaaaaaataagactggccaggcatggtggctcacgcctgtaatctcagcattctgtgaggccaaggcgggtggatcacctgaggtcggggatttgagaccagcctgaccaacatggagaaaccctgtctctactaaaaatacaaaaaattagccgggcgtggtggctcatgcctgtaatcccggctactcaggaggctgaggcaggagaaaggcttgaacccgggaggcagagattgcggtgagcggggatcatgccattgcactccagcctgggcaacaagagtgaaactctctcaaaaataaataagtgaaataaaatttttcttaaaatatattttaaatgtcaaattgctacactaaaaaagacaccaaggtagagatttttataggtgaaatctatgaaatgtcttaggaaactcttctaggacatagactgagatagcaaattatctattttt

SEQ ID NO: 959 - DNA, 976 bp, Homo sapiens
ggattgcttgaacctgggagttggaggttatagtgagctgagattgcaccactgcacactccagactgggtgacagagcgagactctgtcttacaaaataaaaaataaacggttaccaatctgaaaccctgaaaatatgatgagtagtagaaagcacagctgtcaaaaaagcaggaagagattataaaattttttctaatatttccccccaaaatgcagaaaacatactggcaacattatttgaccagaagaagcagtacaataggataaccatcaaatatctgattattaattcaatattccctcttaattaacatgggttaaggaataaatccctaatatatacattatttaaatgtacatgaaaatgaaaacaattgaaaaacctgtgagtggcagtaaaagttgtattggaagttttataacctaatatttgtgcatatattgtaatactaggaagaaaaaatatagaacccaaggaactaaaacaagctgaaatgaattgtgggaggaaggaggtagtattattttaaaaggcagaaataattgaaagaaaaaaactggatctgaatccaaaattgatatttgatggaagagaaaaaaaatgagacaaagtttagtgattccagaggtgaaataaggatgacaaataaacaatattgtatatgagaaattgaaatggctatatatgtaaacttaaaagaactgtgtcatttggggtaatgaaaatgtggcatgggtaaaggttgtacaattttgtttatatactacaggtcactcaactatacactttaaaagggtgaatattatgctgtgtgaatttgatctcaatttaaaaacttaaggctggttgcagtggctcatgcctgtaattccagcactttgggaggctgaggtaggagaatggcttgaggccaggagttcaagaccagtctaggtaacataatgagatccccctcccctcatctctacagaa

SEQ ID NO: 960 - DNA, 5830 bp, Homo sapiens
atctggaatcgatgtgtgaaaccaagttattatctctaaagaaggaagtttatgaaatagaattatgccagagggagataatgggacttacaaagcatggccttgagtactccagttttggagatgttttggaatatagaagccaccttgcaaaacaactgggatatccaaatgggcattttagtcaagaaatattcactcctgaatacatgcccacatttattcaacagacattccttactctccatcaaataattaataatgaagacagaccctatgaatgtaagaaatgtggaaaggcctttagtcagaactcacaatttattcaacatcagagaattcatattggtgaaaaatcttatgaatgtaaagagtgtgggaaattctttagttgtggttcacatgttactcggcatctgaaaattcatactggcgaaaaaccctttgaatgtaaggaatgtggaaaggccttcagttgtagctcatacctttctcaacatcagagaatccataccggtaagaaaccctatgaatgtaaggaatgtgggaaggcctttagttattgctcaaatcttattgaccatcagcgaattcacactggtgaaaaaccttatgaatgtaaagtatgtgggaaagcctttactaagagctcacaactttttcagcatgcacgaattcatacaggtgagaaaccctatgaatgtaaggaatgtggcaaagcctttacccagagctcaaagcttgttcaacatcagagaattcatactggtgagaaaccctatgagtgcaaggaatgtggcaaagcctttagtagtggctcagcacttactaatcatcagagaattcacactggtgagaaaccctatgattgtaaggaatgtggaaaggcttttactcagagctcacagcttcgtcaacatcagagaattcacgctggtgagaaaccctttgaatgtcttgaatgtgggaaggcctttactcagaactcacaacttttccagcatcagagaattcatacagatgaaaaaccatatgaatgtaatgaatgtggaaaggcctttaataaatgctcaaaccttactcgacatctgagaattcacactggtgaaaagccctataactgtaaggaatgtgggaaggcttttagtagtggctcggatctcattcgtcatcagggaattcatactaataaataataaaaattaaagcccctgtcaccttcctcatattttaaaccaaaaatcatgtctaatagttaccctcttccgtagttttttttaaaactttgtatttaaattttgtatccaaatgtatttcattccaggttataaattcggagtctaaagtgacattccctctctcccccagtcatataccgatgccagctgttctataattctttcattcattgttttgttctactttcttggtgacacattatactcatgtttatatttgcttgtgtttttagagctatcttttctgatctgtgtatttgtgtttgcaccagtatcacactgtttgaattgtgtgacctttaatatttttaaattccttgtggaggtttaactttgtttttgaagttagtgttagtctttttgttttattttattattattattatatgttttttgagacggagtttcactctgttgcccaggctggagtgcagtggcgcaatctcggctcgctgcaacctccacctcccggcttcaagcaattctcctgcctcagactcctgagtagctgggatcacaggcgtgtgccaccacaccctgctaattttctatttttagtagagacagggtttctccatgttggtcaggatagtcttgaactcctgacctcaggtgatccacctgcctcagcctcccaaagtgctgggattacaggcatgagcgattgcacctggctttattttttgttgagacggagtttcgctcttgttgcctaggctggagtgcaatggtgcaatctcggctcgtcacaaccttcgcctcccaggttcaagtggttcttctgcctcagccttttgagtagttgggattacaggcatgtgccacaacacccggctaattttttgtatttttagtagagacggggtttcaccatgttagccaggatggtctcaatctcccgacttcaggtgatccacccgcctcggcctccgaaagtgctgggattacaggcgtgagccactgcggccggtctttttattttacaaatgtacatttttaattgttaagccaaaatcacaaagcaaaaaattacaaactaaaaagccaaaattaattgtaatcatacttatagatggctgctctcaatttggtagagaaaatcgtgctatactttgcttttttaagaaagtgtaattatgatatgcatgctgtacccttaactgcttttatcatgccaaagatttcatgagtgccatttcagtaaatatagatttttattattttcatgacatatttaatgactttaaaatgactattcccattatggttgccactaaatttttgcagctataaaagctgacctcggctgggcacagtggctcatgcctgtaatcccagcactttgggaggccgaggtgggcggatcacaaggtctgaagattaaggccatcctggctaacagtgaaaccccgtctctacttagctgggcgtggtggcatgtacctgtaatcccagctactcgggaggctgagacaggagaattgcttgaacctgggaggcggaggttgcagtgagctgagatggtgccactgcactccagcctgggggacagagtgagattccgtctcaaaaaaaacacaaaaactgctgacctcattggatgcttatttttacttttaaaacatttattttaattgctaaaattatctacattttctccttgtgagctgttttgttcccttacatcaatcctaatcccaatgccatactagaaagtaacactgttatgaaagtgttatttatcaatccagatattaattttttgtttgtttgtttgtttttttttttgagatggagttcactctgttgcccaggctgaagtgcagtggcacaatctcagttcaccacaactgctgcctcccgggttcaagcgattctcctgcctcagccttcctagtatctgagactacaggcgcacgacaccatgcctggctaatttttgtatttttagtagagacagggtttcactatgttggccaggctggtcttgaactcttgaccttgtgatccacccacctcggcctcccaaagttcggggattacaggtgtgagccactgtgcccggtcaattattttttcttatagctattagtggtgtttttgttttttgagacacagtctcgctctgttgcccaggctggagggcagtggtgcaatctcggctcactgcaacctctgcctcccgagttcaagtgagtcttccgcctcagcctcccgagtagctgggactacaggcgcgcgccaccatgcctagctaatttttgtattattagtagagatggggtttcaccatattggccaggctgctctcaaactcctgacctcgtgatcctcctgccttggcttcccaaagtgctgggattataggtgtgagccaccgcccctggctgttagtggtattttaaaaaattatgtctaggcatctataataaggctgtatgtattggattgctgtgaagagtcaatgaattaataaatgcaaagtacctcaaactgttatcacataatacaggtttagtaaaagttttccactattatcagtgatatactcattatcataagtatcttcattaggatttatggaaaggattttaaccatgttgtttacctttggcaaatttgtaattcatggtggaaaaagagaaacacttgtaatgagtataacgaagcctttccctatcattattattcagtgtggaattttaaaaggaagagaaaaagtatgtgtgcatagtctttgttcagactttatcttttatgctacataaagaataccagtctgaggctgggcgcggtggctcacacctgtaatcctagcactttgggaggccaaggtgggtggatcacttgaggtcaggagctcgagaccagcctggccaacatggtgaaaccccgtctctactaaaaatacaaaaaaaacaaaaacaaaaacaaatagccaggcatggtgttgcatgcctgtaatcctagctactcaagaggctgaggtgggaggattgcttgaacctgggagttggaggttatagtgagctgagattgcaccactgcacactccagactgggtgacagagcgagactctgtcttacaaaataaaaaataaacggttaccaatctgaaaccctgaaaatatgatgagtagtagaaagcacagctgtcaaaaaagcaggaagagattataaaattttttctaatatttccccccaaaatgcagaaaacatactggcaacattatttgaccagaggaagcagtacaataggataaccatcaaatatctgattattaattcaatattccctcttaattaacatgggttaaggaataaatccctaatatatacattatttaaatgtacatgaaaatgaaaacaattgaaaaacctgtgagtggcagtaaaagttgtattggaagttttataacctaatatttgtgcatatattgtaatactaggaagaaaaaatatagaacccaaggaactaaaacaagctgaaatgaattgtgggaggaaggaggtagtattattttaaaaggcagaaataattgaaagaaaaaaactggatctgaatccaaaattgatatttgatggaagagaaaaaaaatgagacaaagtttagtgattccagaggtgaaataaggatgacaaataaacaatattgtatatgagaaattgaaatggctatatatgtaaacttaaaagaactgtgtcatttggggtaatgaaaatgtggcatgggtaaaggttgtacaattttgtttatatactacaggtcactcaactatacactttaaaagggtgaatattatgctgtgtgaatttgatctcaatttaaaaacttaaggctgggtgcagtggctcatgcctgtaattccagcactttgggaggctgaggtaggagaatggcttgaggccaggagttcaagaccagtctaggtaacataatgagatccccctcccctcatctctacagaaaaaaaaaaaaattaaaacaacaaacttaaaagttggtattatagacatttttataatatatctgaaaatctggaaaaagtctgtgatttttaataagttgacgacatcagaattaactggaggtgtaaaatcttaatagacctccctccagaataaacttatttaaaaaaataagactggccaggcatggtggctcacgcctgtaatctcagcattctgtgaggccaaggcgggtggatcacctgaggtcggggatttgagaccagcctgaccaacatggagaaaccctgtctctactaaaaatacaaaaaattagccgggcgtggtggctcatgcctgtaatcccggctactcaggaggctgaggcaggagaaaggcttgaacccgggaggcagagattgcggtgagcggggatcatgccattgcactccagcctgggcaacaagagtgaaactctctcaaaaataaataagtgaaataaaatttttcttaaaatatattttaaatgtcaaattgctacactaaaaaagacaccaaggtagagatttttataggtgaaatctatgaaatgtcttaggaaactcttctaggacatagactgagatagcaaattatctattttt

SEQ ID NO: 961 - DNA, 304 bp, Homo sapiens
gaatttaggaaaaaacaattctgataaatcaaactttctactttctgaaacttgaaaatcaaattgatttagataagattgtatttcttagtgtctgaactcaggaaccaaatagatgtggatagcatgggatttttggaatacaagataagataatttacatgggattgcaaaagttcaaataactaaagttctgtcaatgaaaatatatgctctaacctcaacatcttctagatgaacccttttttctagcagtatttgacaggatgggatatattttataaataaacttggactattatcc

SEQ ID NO: 962 - DNA, 99 bp, Homo sapiens
aggtgggtggatcacttgaggtcaggagctcgagaccagcctggccaacatggtgaaaccccgtctctactaaaaatacaaaaaaaacaaaaacaaaaa

SEQ ID NO: 963 - DNA, 304 bp, Homo sapiens
gaatttaggaaaaaacaattctgataaatcaaactttctactttctgaaacttgaaaatcaaattgatttagataagattgtatttcttagtgtctgaactcaggaaccaaatagatgtggatagcatgggatttttggaatacaagataagataatttacgtgggattgcaaaagttcaaataactaaagttctgtcaatgaaaatatatgctctaacctcaacatcttctagatgaacccttttttctagcagtatttgacaggatgggatatattttataaataaacttggactattatcc

SEQ ID NO: 964 - DNA, 148 bp, Homo sapiens
ccatgcctggctaatttttgtatttttagtagagacagggtttcaccatgctggccaggctggtctggagctcctgacctcaggtgatctgcccgcctcgtcctcccaaagtgctgggattacaggtgtgagccaccatgcccagcca

SEQ ID NO: 965 - DNA, 304 bp, Homo sapiens; identical to SEQ ID NO: 961

SEQ ID NO: 966 - DNA, 293 bp, Homo sapiens
atttgttcccccttctactttttgcttccctgtggctgctgtttctatcctccagccagagagctagtgtttattttctccattgtgttacacacttgtgcagctgcaaccaccatatccagggcccaatggtaggaggtagagaagaaaagcaaaagggattggcctcatcctcttacaacgatagttccattgaatagagagaaaggttttcctgcctcagagtgttggctgcactaggcttttgttactgtagtctggccctgttaccatgggattgcttgcatgtgggg

SEQ ID NO: 967 - DNA, 293 bp, Homo sapiens; identical to SEQ ID NO: 966

SEQ ID NO: 968 - DNA, 740 bp, Homo sapiens
ctacatgcttcatttgcagtgtaatattggattgtatgagactttgggttttgtgttaatacctacagaaaatgttgatattttctcttagcaggctgtcaaccaggttaggttcaggtcataagtttctacccacattctttgaactgtagttgtcattttagtttatttttcaaaaacttttgcagtacctttttggtctgtcttgtgtgtgccttgcagtgaacagtctggatttggacagtggtctgtctgttagttcagtttctcaagcctttgtcacactaataggattggatttatgtatgtccagcttgggaattattacaggaattaaaaacaactttttagagtgctttcctgagctctctttctatttgttcccccttctactttttgcttccctgtggctgctgtttctatcctccagccagagagctagtgtttattttctccattgtgttacacacttgtgcagctgcaaccaccatatccagggcccaatggtaggaggtagagaagaaaagcaaaagggattggcctcatcctcttacaacgatagttccattgaatagagagaaaggttttcctgcctcagagtgttggctgcactaggcttttgttactgtagtctggccctgttaccatgggattgcttgcatgtggggatacaggagaattcagaaaagaaaaaaagatttgctatttctacattctccctgagcattaagacttccctt

SEQ ID NO: 969 - DNA, 740 bp, Homo sapiens; identical to SEQ ID NO: 968

SEQ ID NO: 970 - DNA, 668 bp, Homo sapiens
ctacatgcttcatttgcagtgtaatattggattgtatgagactttgggttttgtgttaatacctacagaaaatgttgatattttctcttagcaggctgtcaaccaggttaggttcaggtcataagtttctacccacattctttgaactgtagttgtcattttagtttatttttcaaaaacttttgcagtacctttttggtctgtcttgtgtgtgccttgcagtgaacagtctggatttggacagtggtctgtctgttagttcagtttctcaagcctttgtcacactaataggattggatttatgtatgtccagcttgggaattattacaggaattaaaaacaactttttagagtgctttcctgagctctctttctatttgttcccccttctactttttgcttccctgtggctgctgtttctatcctccagccagagagctagtgtttattttctccattgtgttacacacttgtgcagctgcaaccaccatatccagggcccaatggtaggaggtagagaagaaaagcaaaagggattggcctcatcctcttacaacgatagttccattgaatagagagaaaggttttcctgcctcagagtgttggctgcactaggcttttgttactgtagtctggccctgttaccatgggattgcttgcatgtgggg

SEQ ID NO: 971 - DNA, 1478 bp, Homo sapiens
gcattctgtccagtttcctaagagagacagcttggagtatgcttaatccatcttacctgggactgaaacagctgcttattttgccgttaaaaattacatgcagtttactgcgtggctccgggtttgtttgtttgtttttcctctttaataggtttattcagaaaacatgtccactgcaattagggaggtaggagtttggagacagaccagaacacttctactgaagaattacttaattaaatgcagaaccaaaaagagtagtgttcaggtaagttaaataactctttcttatgcttttttgcagtttattttgcttgatatattctatcttgaagtgatgatttattttgctaaatatatttttattataattttatttttctttgcttgtaaagtaaaagcttgccatgttagccacagaaaaataactgaattacttaatgctttctaaatgttaaaaattttaataataatttctacatttagttaatttctaacatctgtgcttcattttcagcttttaggcatgtgtttcctaagtttcatgaactaacattccacaataactttgattccagagttttatatcccacaacctcgtattttatggactctagattgagttgcccatgagtattaatattatgacacagatttgtacccacagcatacattacttttgataagggtaaaagaaaggaagaacttgggtaaccagctagtaataatttcaaaggatgaaaacatattattcatcttccctgaaactggtaaaacaattaaacagcaagatgatataatagctcatttctactaaaactgaccgtagaatttaattcagtatggttttggtagtatacatttaggtataattaaagtatgatttctaattcagaattgaataaaggcatttttatggtgaatccatatagggatgttcggtaaattgctttagataaaattatatgagtaaatttattatgttttatgtcaataatctaagatgtttaaatattatcttttatgtcaccttaatttattttgtgacttgaattttaaaatatttcagtaaaactaaatacaaaggaaaaaataatatgcatgttgggttggatgaggtgttcaacacaaaattcttttgggatagaattgcttttactttttattcataagaaaggacaaccaaatttcctgttttttcttagtattatattatttgccaagaaatcttgatgatttttgctgccattgttatactttgtaattactttgtttcttttattgtaggaaattctttttccactattttttttattttggttaatattaattagcatgatgcatccaaataagaaatatgaagaagtgcctaatatagaactcaatcctatggacaagtttactctttctaatctaattcttggatatactccagtgactaatattacaagcagcatcatgcagaaagtgtctactga

SEQ ID NO: 972 - DNA, 87 bp, Homo sapiens
caccatgttggtcaggctggtctcaaactcctgacttcgtgatctgcccaccttggcctcccaaagtgctgggattacaggcgtgag

SEQ ID NO: 973 - DNA, 7838 bp, Homo sapiens
gcattctgtccagtttcctaagagagacagcttggagtatgcttaatccatcttacctgggactgaaacagctgcttattttgccgttaaaaattacatgcagtttactgcgtggctccgggtttgtttgtttgtttttcctctttaataggtttattcagaaaacatgtccactgcaattagggaggtaggagtttggagacagaccagaacacttctactgaagaattacttaattaaatgcagaaccaaaaagagtagtgttcaggtaagttaaataactctttcttatgcttttttgcagtttattttgcttgatatattctatcttgaagtgatgatttattttgctaaatatatttttattataattttatttttctttgcttgtaaagtaaaagcttgccatgttagccacagaaaaataactgaattacttaatgctttctaaatgttaaaaattttaataataatttctacatttagttaatttctaacatctgtgcttcattttcagcttttaggcatgtgtttcctaagtttcatgaactaacattccacaataactttgattccagagttttatatcccacaacctcgtattttatggactctagattgagttgcccatgagtattaatattatgacacagatttgtacccacagcatacattacttttgataagggtaaaagaaaggaagaacttgggtaaccagctagtaataatttcaaaggatgaaaacatattattcatcttccctgaaactggtaaaacaattaaacagcaagatgatataatagctcatttctactaaaactgaccgtagaatttaattcagtatggttttggtagtatacatttaggtataattaaagtatgatttctaattcagaattgaataaaggcatttttatggtgaatccatatagggatgttcggtaaattgctttagataaaattatatgagtaaatttattatgttttatgtcaataatctaagatgtttaaatattatcttttatgtcaccttaatttattttgtgacttgaattttaaaatatttcagtaaaactaaatacaaaggaaaaaataatatgcatgttgggttggatgaggtgttcaacacaaaattcttttgggatagaattgcttttattttattcataagaaaggacaaccaaatttcctgttttttcttagtattatattatttgccaagaaatcttgatgatttttgctgccattgttatactttgtaattactttgtttcttttattgtaggaaattctttttccactattttttttattttggttaatattaattagcatgatgcatccaaataagaaatatgaagaagtgcctaatatagaactcaatcctatggacaagtttactctttctaatctaattcttggatatactccagtgactaatattacaagcagcatcatgcagaaagtgtctactgatcatctacctgatggtattgtgagcttatatatatattctgtttataatattaagccttttcaatatttatcagcttgctttattgaatgaatagcagtcttaacacttagagatgtgttcctccaccaaagtcagttttataaaaatactaaaattatttaattctgttgccttatttttcttgtgaaacattaatttatattcttggtggtaggaagcatattttatgtacttttatatttaattcttagaccatttataaaatagtttaagtatacttgtataagatacaagctttgatgggctatttcattttgattctgactttcatataattatgaagctagcaatgtttagctgaatgtggtagcatgtgcctgtagtcccagctactcaagaagttgaggtggggggatcccgtgagcccaaaagtttggggctgcagtgaactatgatcatgccacttcattccagcactccttactctgggcaacagaatgggacccccatctataacaataaaaaatttaaaaaggaagctagaaatatgtgataaagactgtaaagcagtcaccttttcagcttaccatgcttgtttatagaagtgtatggtgtaaactgaagaagtacctaactttggagactacaactatgactatggctaagtccctaactctgtcttattcatttatatatatattttttgtagagatgggatcttgctatgttgcccaggttggtctaaactcctgggatcaaatgatcttcctcccttggcctccacctaaagtgccacctaagtcttttttctcaatgtgcacttctcacaaagaaatgaactagaaaacagtgtaagcagtgaagtgccactgaacttaaagtggctgtgagagaacctaaagcaaaagctggagaaagtgacagaaattcttatgctattaatgattaaacaaggaagtgctaaattgtagaaaatgacagattagcatgttattttttgccatatgggatagttgtaattagcttatatgtcatcgcattattggattttatgtcattgaatggaaagtgttaattatacagtcagaagccaggtaacttttattccattggtttctttctctggctatttctatttaatattttgattaaatacacttcttgttatatggtagtgtatcatattaggtacaagtagtatagattaccatgagaatttagtgtacaagctcaaaaagctgattaaaaatgttgaaatgaaattcattggtaattctgagtaggaggaaagaatataaaccaaagaaatatgaggccaggcatggtgactcacgcctgtaatcccagcactttgggaggccgaggtgagcagatcacctgaggtcaggggtttgagaccagactggccaacatggtgaaaccctgtctctactaaaaatacaaaaaaattatccagccatggtggtgggtgcctgtagtcccagctacttgggaggttgaggcaggagaattgcttgaacccgggaggcggaggttgcagtgagctgagattgtaccactgcactcaagcctggcgacagagcaacactcaatatctcaaaaacaaaaaacaaaacaaaaaaagaacaaacaaacaaaaaacaactaagtcagtgtgtattagatgccaaaatagtgtatacatatacacaaatttttttagacttctgtatttttaacaacagaactatctgaaaatgggttatgcatacatacataacatgactggtaggatgttgaactaacaccctctttattcatgtaaatcctggagttccctgtccctcttaaaaggcctggaaaatctattaattaacatttaagtaatactttagaatctatgaagcattttttttttgtctttttcttcttttgtttgagatgggatctcactgtcaagctggtttgcagtgctgtgatctcagctcactgcagcctctgcctcctgggctcaagtgatactcccgcttcagcctcctgagtagctgggactacaggtgcacaccaccacacctggctaatttttgtattttttgtagagacagggtttcgccatgctacctaggctggtctcaagcaatctactcctggactcaagcaatctacctgcctccaccttccaaagtgctggcattataggtgtgaggcaccacatccagcctacaaagcgttttgatgtttgttacttcacttgttcttcacaacaacccagtgtcatcagctaggcattgtagatgaggacactaaagtctgaagagttcaaatcgcctgtctgtgctcacacagttaatacatgaagacgttaagtactaattctatattctttccatttcaccacatgtttgaagcttctgtagtgaaaattagttgcttgtaaacaaaactacaagaaaatatttaaaaattagtcttatctgatgagaaagaatgattacagtattttttccacttatcttctaagaaaggaacaagcaatattggatttgaatgacaatttttatttaaggaggagttgtgtcatagttactaaaatgcctatttagtttctgagaaggattgtggaattttctttataagaaatatttaaaaataaaaaattcatatatttactaaaaagttatttttgtgcaggtgcactggctcatgcctgtaatcccaactagtccggaggctcaggtgggaggatcacttgaggccaggagttcaagaccagcttgggtaatgtagtgacacctcatttctaccaaaattaaaaacaaaaaattagccaggcatggtgatgagtgactatcgaccaagctctactccagaagctgaggtgggaggatctcttgacccctgaagtttgagtgcaagatccagtgcactgcaggctgggtaacagaacaaagccctgtctctaaaaaaatataaaataaaataacgaagttattttttagtttaacttcgagatagataaatgaactgcattactaataatttttataattttattgctgcctgaaattagtataattaattgaggttttgagaaacagcaatttcttgaagaaatatgagttctgcatattgttttatactatatttcatatatttataacataagtataacactgacacatttctgtaatcaaatgacagctgagtagtgtctgcaacattgtaccattttattattattattttgttggaagaattgtcttctttttgtttgtttgttttttttgagacatggtctcactctgttgcctaagctggagtgcagttgctcagttatggctcactgcagcctcgacctcctagctcaaatgatcctcccacctccgcctcccaagtagctggaagtgcaggcacacatcactacacctggctaatttttttattttttggagacagaacctcaccatgttgcccaggttggacttgaacttctgagctcaagcaatcctcccatcttggtcttccaaaatgttgggattacaggtgtgagccactgtgcttggactgttttcattttttaagaagtaaatatagcaaaagtgtttataaaatattccattcatcaaaataattgtaaacttgatctactgtattgtggtattttaatttgtgagctaactatattgttatgatatcttacagtcataattactgaagaatatacaaatgaaaaagaaatgttaacatccagtctctctaagccgagcaactttgtaggtgtggttttcaaagactccatgtcctatgaacttcgtttttttcctgatatgattccagtatcttctatttatatggattcaagaggtaaatagccctacataatcattgaagatcaattaaatgcatatctttgctgcttgcagttcatagtcaaaattttatatagttcaatattggcattttcaactattcttacttgttccaataggaaaactgagaagtatagcataaaaatatttatttataaatacctatctacttctacacataaaacatttttatatatacccattttgatttaatacatttatatatattaaatacagtagcataaagcaaaattgcattttgggttatatgactttctaaatctctttttttcatgtaattgtttttacttgtggtatgtacaaatctttaaaatcttgaggtcttctactagtgaacttgattagttttatatttgaaacatgggaaacaacctttggttgtttaaatctatgaagaaatattatcaaccacaaacatttattgagcaatgttaaagtcactatgctaaatactgaatttgtgactttatttcaaaaagcccttctgaaaattcttttttcctgtttgcttaactttgacttttccttgcttctggaagtgctttagagctaagtcatgtagaatgatttactttaaaacaaaaaagtaacttgttttaaataactacaattaatttctttctttacatttttattcatttactatttagtattctaacacatataacttttatttcaaaatttcaagtaaatgatcagaaatcttgtaagtattgtttacctttgaaagtcagtagcttatttctttggtcctgtaaagattgattgattatattgttttggtaggtatctctccatataatatctttaaaacgatgcacttgcatgttgtacagaatcttagatctcatattcttccccccatagctggctgttcaaaatcatgtgaggctgctcagtactggtcctcaggtttcacagttttacaagcatccatagatgctgccattatacaggtaaatatgataaaggaagaaatacaaaaactatgccattttaaaataaatatttccttattctttacaatagtatttggtttgactactgtcaaatgtacaaaatatgtaacctactacaactcctttgagaaaaaagataaaaaagtcatattttctgatttggtactttttgttgtgtttcatattttagcagaaaaactggccatgaaatttatttttaaaaatcttacttttgtgtctgggctagataacagtagatgaagttaccttagaattcaaactattcaaattaaccatatttcattcttccatgttctgtatggatctgtggcttttttttccatttgccctttctaattgaatttactatgctacaaaatttactatgctacaaaatattgtaatttcaaaatgtatatcaaccatcttgtctgctaaacaatacgtttaaagtatgtatgaataatgatggagctggaatcaaaatctgaacaggagtcttgtctctgttgttacactgctatgtagtaaaatgactattataatagtactttacttgacagcattgtcgtaagaaccaaatgagatgatttatgtataattgtcttgtaaacttttgtagtacagtataaacatattagggacgtgtaatattgcacaaattcaataatacagaaatttaaggtaaagatagtgaaatacggatctattacattgatgatgttgtatcacctatttgtattttggccaaagtttttagccatccacagcacagaccacactggatgaataggcaggatagatttcaatttaggcattaattggaatgttagaagtattatgtggcataaatagttttattatttggtctatatgtgctaaatatatagactttaaagcagtagaagggcatggtatttagaagaacattttttaaacaatcataggaatgatggcactaataatcactcctaaattcctaaattttgaagatgtatatttttactaagatacatataattgtctgcttaagatgataattgtgcaattttattttatttgacaaattatttaatcaaaatttatacacttactgactttaaactttaaactttatggtatacttttagaataaattgaatgcaatattctactcagaattatgatattggggtcactcactttatttcaggtatggagctttttgaggattgtatttgtactaggttactgaccaaatttagggatatagctgtcccgttttactaggggctgctatcataactaaattaatttgatgtatttacattttctaattatagttgaagaccaatgtttctctttggaaggagctggagtcaactaaagctgttattatgggagaaactgctgttgtagaaatagatacctttccccgaggagtaattttaatatacctagttatagcattttcaccttttggatactttttggcaattcatatcgtagcagaaaaagaaaaaaaaataaaagaatttttaaagataatgggac

SEQ ID NO: 974 - DNA, 87 bp, Homo sapiens; identical to SEQ ID NO: 972

SEQ ID NO: 975 - DNA, 87 bp, Homo sapiens; identical to SEQ ID NO: 972

SEQ ID NO: 976 - DNA, 1168 bp, Homo sapiens
aagaccttgaaaaactgaagtatgcagtggagtgactgtatagataccacatggagaccttaaaaaacaaaacaaaacagaatcccatgcccaaccccagatattctatttaataagtctcaaatgaatcctcaaaatctgtatattaaacaagtcccccagtgattctgatgcgtagtcaggttggggaccactggtctagaatatagcagctgagttgggacagggaagatgaaaaaaaagagtaagataaaagtcaaagctaaaccataggaagactggtgtgaggaactgggagaacttagcccagatgtgaaagtttggggaagtgcatgggatggaaacgataactggcttcaaacacccagaggctgatacgtggaggaaactagcagaattcttcctaataaatgctgttccctactaagaggaatgctggccactggaggaatggcggattctgggtctgggctaagggaaaatacaagatgatcctggacatctagttgtgatagaaagctaggaagtgctcaactaatggggtcatgttgaaaagacagatggtagcatcaagggattttcactggccaaattttggggtaatttgagtatccaaaaaaaatgatgataatggatcccatgtaggagaaatgacagaacttagaaaatcatcattttgtaattctcaaagtaatagttgatgcaggcaaagatcatcagtggcagctaaaacttctgtaaaaagttgttgggaaacatcaaaagataccagctgctgtttaaaaaaaaaaaaagttgttgggaaaagttgttaaaatatcaccccacagatcagtttttaattgcaaagggggaaaatttaccatttcaatggagagacctagtggtcaccatctaaatcaagtagtcaacatgtatattatcactagtgagataagcagtacacttatgtagtagtcctaaggaaaaaaaaaaaaaaaaaaaggctgggagaatattccaggtaacaagagaccaaagaggccgggcgcgttggctcacacctgtaatcccagcattttgggaggccaaggcaggtgaatcatttgaggtcaggagttcgaggccagactggccaaaatgatggccaactccatctctactaacaattagctgggcatggtggtgc

SEQ ID NO: 977 - DNA, 1168 bp, Homo sapiens
aagaccttgaaaaactgaagtatgcagtggagtgactgtatagataccacatggagaccttaaaaaacaaaacaaaacagaatcccatgcccaaccccagatattctatttaataagtctcaaatgaatcctcaaaatctgtatattaaacaagtcccccagtgattctgatgcgtagtcaggttggggaccactggtctagaatatagcagctgagttgggacagggaagatgaaaaaaaagagtaagataaaagtcaaagctaaaccataggaagactggtgtgaggaactgggagaacttagcccagatgtgaaagtttggggaagtgcatgggatggaaacgataactggcttcaaacacccagaggctgatacgtggaggaaactagcagaattcttcctaataaatgctgttccctactaagaggaatgctggccactggaggaatggcggattctgggtctgggctaagggaaaatacaagatgatcctggacatctagttgtgatagaaagctaggaagtgctcaactaatggggtcatgttgaaaagacagatggtagcatcaagggattttcactggccaaattttggggtaatttgagtatccaaaaaaaatgatgataatggatcccatgtaggagaaatgacagaacttagaaaatcatcattttgtaattctcaaagtaatagttgatgcaggcaaagatcatcagtggcagctaaaacttctgtaaaaagttgttgggaaacatcaaaagataccagctgctgttgaaaaaaaaaaaaagttgttgggaaaagttgttaaaatatcaccccacagatcagtttttaattgcaaagggggaaaatttaccatttcaatggagagacctagtggtcaccatctaaatcaagtagtcaacatgtatattatcactagtgagataagcagtacacttatgtagtagtcctaaggaaaaaaaaaaaaaaaaaaaggctgggagaatattccaggtaacaagagaccaaagaggccgggcgcgttggctcacacctgtaatcccagcattttgggaggccaaggcaggtgaatcatttgaggtcaggagttcgaggccagactggccaaaatgatggccaactccatctctactaacaattagctgggcatggtggtgc

SEQ ID NO: 978 - DNA, 626 bp, Homo sapiens
tgtgtgtgttcctgggagtcccagagggaggacagaatgcacctctgtgggtggaacttggagggggatatatttctgcacaaaatgaggaagaatttcctgacagagctggtcaaaaatggaatgggctactctgtgaagtaatgctgtcaaagaaaagctaaataagctagcgctggaaataaaaatagagaagattcatgcatggctaagtcattattctagatggctccagctccttgctcactaatagccaataaatatctcttgtgagtctctgttctggctcagaatacaatagaaaataagaaaaagtctccaggttgaaggagggtccattgttgtggacttacactcccaatctctgagaatctattgaccctaaagtgaagttcccagtctttacagttatattttaggcaatgctgtggtacctttgagggtattcggaaagtattctcagtatttttaatctcttatttatactgtcaagttctttaggactgtgctattggtcttggtaaccctgacacttagtagattgcctggcccacaataaacaataaataattgttgaataaataaatgccaaaggtattttgaggagagaaagggaaatatcagta

SEQ ID NO: 979 - DNA, 294 bp, Homo sapiens
tttttttttttctttgagatggagtctcgccctgtttcccaggctggagtgcagtggcacaatctcggctcactgcaagctccgcctcctggattgacgccattctcctgcctcagcctcccgagtagctgggactacaggtgcccgccaccatgcctggctaattttttgtgtttttagtagagacggggtttcaccatgttagccagggtggtctcgatctcttgacctcgtgatccacctgcctcggcctcccaaggtgctgggattacaggcgtgagccaccgtgcccgg

SEQ ID NO: 980 - DNA, 626 bp, Homo sapiens; identical to SEQ ID NO: 978

SEQ ID NO: 981 - DNA, 279 bp, Homo sapiens
gagatggagtctcgccctgtttcccaggctggagtgcagtggcacaatctcggctcactgcaagctccgcctcctggattgacgccattctcctgcctcagcctcccgagtagctgggactacaggtgcccgccaccatgcctggctaattttttgtgtttttagtagagacggggtttcaccatgttagccagggtggtctcgatctcttgacctcgtgatccacctgcctcggcctcccaaggtgctgggattacaggcgtgagccaccgtgcccgg

SEQ ID NO: 982 - DNA, 9689 bp, Homo sapiens
aggattggaggttttaaagcaggaaacagcagttgttgaaaacgtccccattttgggactttatcagattccagctgagggtggaggccggattgtactgtatggggactccaattgcttggatgacagtcaccgacagaagggtaggaaaaacgcagatggactttgtgacttcggcactcagatcctttcttccctttgtctctggaaaggcgcccgtgagatgctggcagatcagccgacatctgttcacttgagccaggctcagctggagatgttgcagtcactttgattgcttggaatattttgataggtgtctgagtgtgcacacatttaataagcaaaacaaagctacttgttggggccatgatgcctcttctccatcttcaccttcctgaggccagcggaggcgggactcccgcgttgtggtggagagtcccttccctgacttccttggggcctgcccctcccaggcttcctacgccgtgctgcctggactttgtgggcactgccacgagggggcgcccttctctggtctgactcactcttttactggagggctggctcttggctgtccttccagacctggaattcgggcttttcttagcctttatcagtgaagagcgtttgttatctcgaggcgtgaaggggaggcaaataggcatgccagtcctcttccctccgcgtctttatgtcagtctctcgatgcatccgttggatttgggggcttgaggttgggcacagactatttttctcattttgtaaaggggagaaagaatggtaaaagtgctccatgtttttacctggtgagatgataatgacaccaggactgaaaggcaaccttctaatgcgctgtgaccactggggaactcgagcacaggcgggtggtgagtgacagaatgagcactacagcgtgcgctgagagtgtgtgtgtgcccctccgttttcaggctgaagttgactacattcctggcatttatgtaaatccctagactgggatgggtctttttaaaaatcaaaaatggggccgggcgcgggtggctcacgcctgtgatcccagcactttggtaggccgaggtgagtgggtcacaaggtcaggagttcatgaccagcctggccaacacagtgaaaccgcgtctctactaaaaatacaaaaattagccaggcgtggtggcgtgtgcctgtagtcccagctgcttgggaggctgaggtgggagagttgcttgaacccgggaggcagaggttgcagtgagccgagatcgtgccactgcactccagcctgggtgacagagcaagacactgttttaaaaaataataataaaataaaattaaaattaaaagtgagggttaaagtcacagttaaaggaggttaatgttttatttccacagagattttaagacctgagatctcctggtaagagtctttattaaattgtaaatgcctgagagggtggtcctaggccttacatttaaaatggcagcttttttcatctttcaggggcattaagcacttgaccagaagtgccctttaatgagaggaaagtacttaatggcatttttctcacacggatcttgtctagtccaggttgatgttaatggaacttgaaggggcagacacaggagaaacaagatggaaacagaagctccaggtttcaataccaggttgcgccttccctctcagaaaggatcctttgtgaacgggagctgttgctagcccagtgcctcgactctgaggtgtccctgaaaacaaattgccctttctctgctgtcacacttccagtggtcagggccctgccgactcgaagcccagctcaagtgaacagatgctgcatgggtgttgagccttgcctccaccccctggggtgtcagtacagttccttctccccaggagagcctctgggatgcagcaggagccatggccctccgttctcctctccctgttgcccctgagaccccgctctcaggcccttcttttctcagtgggtgtcacatggtctcactgtctctgaatgagctccattctgcccccatccatgaggagctgagtgtggcactcaggcagttggtgcaacctggtggacagtggtgctgaccacctggaaccctggggcactgggagtggagccctggtcaggtcatggctgtgtgtgcttatctggctgggctgggccactgagaatgcatgtcttatgagaataggggaatctggaacatgttggatttactttgacctaaactcgtgacttctgaactcccatttcccccacttttggggactaacttaaaaaaaattcctttagagatttcttcttaaaagctaaattccgggccacgtgtggtggctcacacctataatcccagcactttgggaggctgaggcaagaagatcacttgagcccaggagtttgagaccagccagacccatttctgcaaaaaataaaaaattagccgggcatgctgtcatgtgccttcagtctcagctacttgggaggctgaggcaggaggatcacttgagcccaggagctcaaggctgcagtgagctatgattgcgccactgcactgggtgacaagagcgtgactctgtctggaaaaaaaaaaaggaattcctaaacaggcttgttgacttcgcagactgcttttggcttctggatgccctcctccagtacacatcgtatggggtgacaccgcctagcctcagtcactctgggaaccgccagcgccctcccagtggagcaggctcagtcactccagagaggatggaaggtgagtggatgggcaggatgccttggggagggaattggatccagctgaacatgatgctacttcagccagtggctgtgcctgccagcaagtggggccagtttgtgtgcgccgctgagtggttttcgtaatggctgcgggtagagcagcactcagcggctctaacctgccgagaggccatccttagtccccagagggccatgatcgaggacccagtgtgcagctgctttcccacgtgcaccccgaccctcacgccactctgagtgtgtttaccgtcccgctctcacaggtgaggacagtggctcctacagatcttcaggaagaatcaccaacattctagagcacttgccaggtcccatgcagcaggctgggatgctcccatggattacctcactgtcccctctcagtaatcctgtgaaaatagatgttattattcccagtttccagatgaggaaatgagagctgagagaaattagataactgcctgagatcgcctgggcggtatgtggtggtggagcctcaacccgcctctggggcctgtgctggtgccgtggggccgccagctgcttggcacttagtggggtgggtatcagtgcgtctaagtccctggtgtgctggtccttacagcgctgcccgtagaaggctcatgggaaccacaggcatcatttaaaattttccaggagctgcgtttaaaaagtaaaaagaaacacagatgaaactattttaataatatacttgagcccaagacatgaagaatattagaatttaaacacgtgataccttatttcacttgctcagtagctacgtgtggttggcacaatggtgcagatctaagaaatagaaagaattttgaaaatgcagagtggttttttatttggccagagaattaaatattttagaagagaagtattttttccatgaaaccggtctgtagcttagatttcgcaggtgtagccttgcgtgtgtcagtggtggtcagcaaagtttgaccagccagtgctgtgcacacatctgcccatcttcaagggaacggttctgattttctcacccaccttcagcaatggaaacacacattgtccgggaggaaccaatcaggcgtggctcctgcggctcatggaggatagcttaatagagcacaggggctctgtgctgtgttgtgggaaagcagacagactcataataaggccctcctttttcctttgcattttagtaatagagatgattttcctttttgttgatgttgctgctaaccacaggaaaccatcttcatcggtactccaaggttctggaggcccatttgggagacccaaaacctcggcctctaccagcctgtccacgcttgtcttgggccaagccacagcctttaaacgagacggcgcccaggttagtgtccgcctgtgcccttccactctttccacggggcttgtgagtcattgcttttcttataggagagaatggaattttactgacatcactatcgaattgtcagatcttcaagcttgtcatttgcgacagttatttagtgaacctcgtattggcctttggaaataggctctttggtggtatcctgcataaaaagtgctttggataattagcattttgttacatttggttaattcttttttaaaaagctgggatccaacagagtgatttcatgggagctggagctctaagtcctgtggttggggagttaagagctgccggctgcagtgtgttccctgtttcagacattgatgataagatacagatagttcccttcttctgtcatccccgggggccgcggttgcagcctgtccaagaagagcatgcttctgtgtcattacgtcctgtgctgactgtgactgggggtgaaagcacccgcctccgatggcaggctgtgacctctgctgctgtctccacactcctgtttgcagtgccgcctggatcccttctccagctcactaactcggcttcttcatttgcatcgtttcctttccgtacccagtgtttgaggtggacctgctgtttccctctgtggctaggaccagctcggcatggctggtcccctttttctccagatgccacccccttactttttctgtgacgtccctggcccaaacaggacaatataagaagaaagggggagcttctcctgagaaaggggatgaagccagggacagctgtcagagctgtgtccgtggccgggcaggcacacctcccaccccatcaagcaggagtcttgccctccgaggccccctggccgcctggtacccggcccctctccccagcccctcaggcaggaggctaccctcttgacaggccccctgcctgccttcttttcctccagtgatggtatggggccagggacggaggccaccttccgtcctgtaaggcgaagaggagagtgcccgtgtgaaggtggcgaggctgccttccgcctttactcctcatcataaaccgaaagtgctgaacacaccacgcactgaccgtatgtcttcatttcgaatatgcttaatagaacacaggaaaatggtagaatcatcacattgtctcatcagtagctttcttcctgaaccttaatcactgggtacttttccattccagttcacatctcatcatttaaacatttctgataagtttccatttttgcatcttatttatttataaccttctattagcctagcattcaaaccagcatttatattccagccatggtcagcaattcatactcagtgaacagtgttagctgaatttccagaaacccaattattctccacagtgttgttcaggacttgaagcagataacaatatcctttctatccttggctatctacctgttcacatcaaataatccatcacatactgaaccggcccatccagcatgttgataatggacagctcctggaatttgattttcacaatcactcagtaattccttcttctcagtacgctgctgggttttacatttatcttgcttttcatatcttgttgaaaattattctcggtccccagagacctagatcgacgcatattctgagtctccaaaagagatttgagaccaggagacagctccagatgctgtcagcccagtgctgggggcaggcttccatctgtgaagtggagaggcgctttgggcttcttcgttggcatcaggtgcccatacctagggcagctgtggaagtgtcagcgtcctccctgagaggaactcctgctccggtggctcctcagtccttccgtcagtatgctgtaaagcacccacatggtaatgggtgtggactgttaccatgactgctccactagaaagtgccatcaccaaagaatgagattctggaacaggatatcactgttagaatggaaatatagcccatagatattcagctacaaagtcataaagcctaaatgtcattgattccgtaacttaacactgtcagtttaactttcagactgattaagcctgaagtgtaaaattaaatcctataaaatagggcgggttataatgagtgctcattggcattcaggcagttgccgagctgggagtatcgagtgggagtctctctcttgcctgcctagggaacctctactccagacccagcccttgcccggccagcttggcgttgactttccagcctaattgctgataggactggacgtctttgctttcacttgcccaaagtgaaagagacaggctgacagtttccaaatgaataaataacagaaaaatagagaaattttaatttgcaaacttactgtattcttccccctcacttaagccagagtagtgtttttcccatcgcgctcttcgctctagctccggtgtcctcccaagctctgtgctgctgttgccagcgtatcaacctctctgtcttcttcgggtctaagttgtattggcctgaacgagtttttcagatcccagagttaataatgatactgtgcaccacagagtgcaggaatcgcacacgttcatttgatcgtcccccgcctgcaggcaaggcagatggggaccccacgttttgctgctcagactctctcccactgttggttccttgtatgtttcgtattctccctggagacagtggtttcttcagagacaaagatgctgtctggttcccggcaccagtttgcccacttccttatatgcagtggttctggaatcaccattgcctccgactgctccaggccttagggagaggacctcgatagccccaggctcaggtccactcagcaggcttcagctcctccccctgacaggctccttccagggcctcgcttggagtgtcctcccgaggcgcttggtcatgtttagctttatgcaaaaacaggctcctgctggtcatattgtaaactcagtagaatctcatgaacagggacttgattttgatctttctccctcgggacgtggaaacggccaccatagttgctgtcagtggcatttaggtggccgtggacgcaaatggcatttcacatctccccgtagatcacttgctctgtcttgagtttcagttgaacttcctagactagtacctagactagtacaatggcttatttttgttttgttttaatccattttcctgaagtaacctttggaaacatcagaagctactctccattgacctggacaaggtggtgttacccaactttcgatcgaatcgccctcaagtgaggcccttgtcccctggagagagcggcgcctgggacattcctggaggtgagttctcggctgctttgtgattgtgctcagtcatcctgtattttgttcaaaggagtctccctccctccccaggaggcgggccagactctccctgtctctgccttcctgggagctgtggtggccttggctcttggcttcttttgtggcacaaaccagcatgagcaagggcaggcctgacagattaagagattgttgtttcccttagaaaatgctacctagattttcacatttgaatttattttacaacggctgggtgatctacttaaacatgttcaaagtaacttgcacgctctttatgaaagttctgccagccacctattaacgtcccttacaggatgcctgtctgctggtttgggtcccagccaatggcagcagccgccctggctcccagccctcagcccagaaggccccttcagttctctgccctgcccccctgggagggacttgactgagctggggtgtgtcccttaggtggtctcatcctgtctgtctctccagggatcctgactggctacatagactgcctagggcaggttcttctccactacccaaggcaattggtaccaggcctttccagccgagcctgggcagttcttttgctctagagtcccctgtactcttccaaagagtttatagctaccaagaggagtttctctgggttccaggaattgtccagaaatgggatcaggaaggggcacccctgtctgtgcagtccagccctggacaccacgtggtggtgccagggtcctgagggccttgcgcataggtcacggggtgcgctgaaggtaaattccagagcccttggccttgcccagtcgtattgacattctgaaccagggtcctctgatggcctctcctggctttcagccacacgtcccctccatgaagggctttcccagaggcggggcactgccagcggtgcttcttccgccacgccccctttctcctcctcccactcagctggaaccacaggcccctccttctcccctggatagagacgtgcccatcttcccttgtgtttagagaaacacagagcgcctctgggcctcccttcggtaggttgtgacagaagcatagctgggcctgatcatccgtctgcggggatcccagggaggaagggcagcagagatccaccgagcctccaccccacaggaagtggctgctctttgctctcatccactctttattaatagcctgggttactttagctaaggcttaaaaatgatgtatgccctgcaagcccagctagtgaaattagctcgcatttagtttctgatgaatccagccgtcatagaaaaaggccgtcatggtagctctgtggcgttcctgcctgttcaaccggctgtcctcttacagggatcatgcctggccgctacaaccaggaggtgggccagaccattcctgtctttgccttcctgggagccatggtggtcctggccttctttgtggtacaaatcaacaaggccaagagcaggccgaagcggaggaagcccagggtgaagcgcccgcagctcatgcagcaggttcacccgccaaagaccccttcggtgtgaccggcagcctggctgaccgtgagggccagagagagccttcacggacggcgctggtgggtgagccgagctgtggtggcggctggtttaaaagggatccagtttccagctgcaggtttgttagagtctgttctacatgggcctgccctcctgtgatgggcagaggctcctggtacatcgagaagattcctgtggatcccgtcaggagggacttagtggctctgccgccagtgagacttcccgccggcagctgtgcgcaccaaagactcgggagaactggaaaggctgtctggggtcttctgactgcaggggaaggatgtactttccaaacaaatgatacaaccctgaccaagctaaaagacgcttgttaaaggctattttctatatttattgttgggaaaagtcactttaaagacttgtgctatttggaagcaaagctattttttttgtcagtggaatgcagtttttttactattccatcatgaggaacaacatagattccatgatctttttaatgacagtacagactgagatttgaaggaaacatgcacaaatctgtaaaacatagaccttcgctttatttttgtaagtatcacctgccaccatgttttgtaatttgaggtcttgatttcaccattgtcggtgaagaaaattttcaataaatatgtattacccgtctgaagcttaaagat

SEQ ID NO: 983 - DNA, 5458 bp, Homo sapiens
tttttctctttttttctttttttttctttttttatttatttttctttttttttattatactttaagttttagggtacatgtgcacattgtgcaggttagttacatatgtatacatgtgccatgctggtgcactgcacccactaactcgtcatctagcattaggtatatctcccaatgctatccctcccccctccccccaccccaccacagtccccagagtgtgatattccccttcctgtgtccatgtgatctcattgttcaattcccacctatgagtgagaatatgcggtgtttggttttttgttcttgcgatagtttactgagaatgatgatttccagtttcatccatgtccctacaaaggacatgaactcatcattttttatggctgcatagtattccatggtgtatatgtgacacattttcttgatccagtctatcattgttggacatttgggttggttccaagtctttgctattgtgaataatgccgcaataaacatacgtgtgcatgtgtctttatagcagcatgatttatagtcatttgggtatatacccagtaatgggatggctgggtcaaatggtatttctagttctagatccctgaggaatcgccacactgacttccacaatggttgaactagtttacggtcccaccaacagtgtaaaagtgttcctatttgtccacatcctctccagcacctgttgtttcctgactttttaatgattgccattctaactggtgtgagatgatatctcatagtggttttgatttgcatttctctgatggccagtgatcatgagcattttttcatgtgttttttggctgcataaatgtcttcttttgagaagtgtctgttcatgtccttcgcccactttttgatggggttatttgtttttttcttgtaaatttgtttgagttcattgtagattctggatattagccctttgtcagatgagtaggttgcgaaaattttctcccatgttgtaggttgcctgttcactctgatggtagtttcttttgctgtgcagaagctctttagtttaattagatcccatttgtcaattttggcttttgttgccattgcttttggtgttttggacatgaagtccttgcccatgcctatgtcctgaatggaaatgcctaggttttcttctagggtttttatggttttaggtctaacgtttaaatctttaatccatcttgaattgatttttgtataaggtgtaaggaagagaattttagaccaatatccttgatgaacattgatgcaaaaatcctcaataaaatactggcaaactgaatccagcagcacatcaaaaagcttatccaccatgatcaagtgggcttcatccctgggatgcaaggctggttcaatatacgcaaatcaataaatgtaatccagcatataaacagagccaaagacaaaaaccacatgattatctcaatagatgcagaaaaagcctttgacaaaattcaacaacccttcatgctaaaaactctcaataaattaggtattgatgggacgtatttcaaaataataagagctatctatgacaaacccacagccaatatcatactgaatgggcaaaaactggaagcattccctttgaaaactggcacaagacagggatgccctctctcactgctcctattcaacatagtgttggaagttctggccagggcaatcaggaaggagaaggaaataaagggtattcaattaggaaaagaggaagtcaaattgtccctgtttgcagacgacatgattgtttatctagaaaaccccatcgtctcagcccaaaatctccttaagctgataagcaacttcagcaaagtctcaggatacaaaatcaatgtacaaaaatcacaagcattcttatacaccaacaacagacaaacagagagccaaatcatgagtgaactcccattcacaattgcttcaaagagaataaaatacctaggaatccaacttacaagggatgtgaaggacctcttcaaggagaactacaaaccactgctcaaggaaataaaagaggatacaaacaaatggaagaacattccatgctcatgggtaggaagaatcaatatcgtgaaaatggccatactgcccaaggtaatttacagatttaatgccatccccattaagctaccaatgactttcttcacagaattggaaaaaactactttaaagttcatatggaaccaaaaaagagcccgcatcgccaagtcaatcctaagccaaaagaacaaagctggaggcatcacactacctgacttcaaactatactacaaggctacagtaaccaaaacagcatggtactggtaccaaaacagagatatagatcaatggaacagaacagagccctcagaaataacgccgcatacctacaactatctgatctttgacaaacctgagaaaaacaagcaatggggaaaggattccctatttaataaatggtgctgggaaaactggctagccatatgtagttgtttattttttaaagaataagaaactgacaagtctaaaaaactgcccagttacatggtttaaaagtagctctctcattttgcattcctgccaccaaggtatgacagttctagtttctccacatccttaccagcatttggtggtgttactattttttatttttattgttctgataggggtgtattgacatctctacatctcttcttggccttataaatattctttgaaaatgttttttaatagctggtgctatctactactagactttatttgaaacctaaataggtgagtttttaaactaccaccataaccaataacagttattacctgttgaatgacctttcaacaattctgttttcactgtactcacttactgagctttatgaactggccagggaaaatagcttacaggttgtctctttatttaaaataagtcattcatattttgcccttgtcttatccactctctcataggcttgcagagagagagagagagagagagagagagagggatttaattaaaaatgagtacatctgaggctcctgctcagagatcccagctgaagtggctgtgttgatttttcctggtgttatgtcatcggaaggcattttaaagcccaggtattgtatcaacataaatgttcttcattgccttgcacaatgagttcttgtaatcattcatcagagggtgactgaggagtctgcctctgcccttcaagaagccacagctcattgtctgcacttcctttcattgccaactggggagagcttcagaaaggaggaacataagcattgggatgcacgaggaggtgggtttatgtaggtgattaatgcagttccataaaaagagcttctctaggagaacaaagtgctacttcatttgtgggaagacaagattgaagaagagctctctttaatgcactagtcaggagcagatgaatagatatattgcaaaactcccttcctaggaagaaacaagtccccccaaacctgagagataatggcatgtcagtcaattttaaaatggacattagaccttaagagaatgtgaaacccattaagctgtaggggttgcaaaagaaggggcacataattagagcataagtctcctggctgtgacagcatgaggtcttgggaagatggattcaccagcctggtgctgaactccacagctgggctgagcaggttcacctcctgttgctgtcaccacagataatcctcctgggatacaaggtcttaatgtatgccttcaccaagactaccttccagacttaataaccccataaatccctgggagatgttcattctaattgactacttaggaacagcatttattgatgacgagctaaattttcagaaatcaattgctaattagtgacacagccaagataatgatataaacaatgtctaggttgcaggaaaagctatgaaaaaaagataaaagctaacagatgattaaaaaaaaaaaacaactaaaagttaaataagaccagaatgaaaagcaagtcaactataggaaaagtccttaggcaggaaagtagcaggcctgatgtcttgttctaacgtcagcatgagctgtgtgaccctatctagctgtctttacctgctccaagttaaaagtttacttacacaaaaacaagtgacctaggagagactaatgggggctcattcattttttaagaattaatagactttaatttttagaggggttttaggcttacaaaaattgagcgtatagtatagaattaccacatgcttcctctatccttgcctcagttccccctattattagcatctggctttggagtgctacttttgttacaattgataaactaatattaatacatgattattaactaaaacccatactttacattagggttcactccttgtacaattctgtaggttttgtcaaatatatcatcatatgtatccaccatatccaccagaatagtttcactgctctaaagaggccctgtactccatctattctttccttcctctctctccccaagttcctggcaaccattgatctttttgctgtctccatagttttgtcattttcagtgtcatacactggaaatcaaacagtagtaggtagcctttttggactggcttctttcacttagcaaaatacatttaagtttccttcagggtttttcatctagcatgatagatacatttttataattaatttattcaatcattagttattagacgcatgtctgcttcaagtactggctgggcccagagacataaagacaagcaagaaattgctttacttgtatgaatttcacatgggaaccagtggagagacagatgattgaacagtggcagtgccctgcagagaggaaaaaatgagagtagaaggtgaagacagtgcactgtgttagatgatgtctcagggaagctggacagggggtcctagtatgtgtagaggaggaggcaaactctgaactggaccagcttcccattttaccagccaggaaaaaggaagaaagtgtgggagaaaactccatcggtgtaaaaattaatacattaaaggaagtgagaaagttaaaatagaagataataaggaagaacatatttttagttgtaatggttctgaatgaatacctgatatgagtgttttctattatttcctcttacaaaatagaagaatctttgctggtgcctgaaacaaaattaattcattttccttgaataacctaagtttaaatatgggtcttttttttttccattgagaatcatagcattttacaacaggaaggaaacttaatggaaatttagtttaacttatttattttacagatgaggaaactaatggctaaaaattgcttttcccagctatttaagaaatggaagtatttttagtagagatggggttttgccatgttggccagggtgatccgcccacctcggctgacagagcgagactcatctcaaaaaaaaaaaaaaaaaaaaaaaaaaa

SEQ ID NO: 984 - DNA, 5458 bp, Homo sapiens; identical to SEQ ID NO: 983

SEQ ID NO: 985 - DNA, 866 bp, Homo sapiens
ctggtgttatgtcatcggaaggcattttaaagcccaggtattgtatcaacataaatgttcttcattgccttgcacaatgagttcttgtaatcattcatcagagggtgactgaggagtctgcctctgcccttcaagaagccacagctcattgtctgcacttcctttcattgccaactggggagagcttcagaaaggaggaacataagcattgggatgcacgaggaggtgggtttatgtaggtgattaatgcagttccataaaaagagcttctctaggagaacaaagtgctacttcatttgtgggaagacaagattgaagaagagctctctttaatgcactagtcaggagcagatgaatagatatattgcaaaactcccttcctaggaagaaacaagtccccccaaacctgagagataatggcatgtcagtcaattttaaaatggacattagaccttaagagaatgtgaaacccattaagctgtaggggttgcaaaagaaggggcacataattagagcataagtctcctggctgtgacagcatgaggtcttgggaagatggattcaccagcctggtgctgaactccacagctgggctgagcaggttcacctcctgttgctgtcaccacagataatcctcctgggatacaaggtcttaatgtatgccttcaccaagactaccttccagacttaataaccccataaatccctgggagatgttcattctaattgactacttaggaacagcatttattgatgacgagctaaattttcagaaatcaattgctaattagtgacacagccaagataatgatataaacaatgtctaggttgcaggaaaagctatgaaaaaaagataaaagctaaca

SEQ ID NO: 986 - DNA, 89 bp, Homo sapiens
ttttgagatggagttttgctcttgttgcccaggctggagtgcaatggcgctatcttggctcactgcaacctctacctcccaggttcaag

SEQ ID NO: 987 - DNA, 89 bp, Homo sapiens; identical to SEQ ID NO: 986

SEQ ID NO: 988 - DNA, 2486 bp, Homo sapiens
tttttctctttttttctttttttttctttttttatttatttttctttttttttattatactttaagttttagggtacatgtgcacattgtgcaggttagttacatatgtatacatgtgccatgctggtgcactgcacccactaactcgtcatctagcattaggtatatctcccaatgctatccctcccccctccccccaccccaccacagtccccagagtgtgatattccccttcctgtgtccatgtgatctcattgttcaattcccacctatgagtgagaatatgcggtgtttggttttttgttcttgcgatagtttactgagaatgatgatttccagtttcatccatgtccctacaaaggacatgaactcatcattttttatggctgcatagtattccatggtgtatatgtgacacattttcttgatccagtctatcattgttggacatttgggttggttccaagtctttgctattgtgaataatgccgcaataaacatacgtgtgcatgtgtctttatagcagcatgatttatagtcatttgggtatatacccagtaatgggatggctgggtcaaatggtatttctagttctagatccctgaggaatcgccacactgacttccacaatggttgaactagtttacggtcccaccaacagtgtaaaagtgttcctatttgtccacatcctctccagcacctgttgtttcctgactttttaatgattgccattctaactggtgtgagatgatatctcatagtggttttgatttgcatttctctgatggccagtgatcatgagcattttttcatgtgttttttggctgcataaatgtcttcttttgagaagtgtctgttcatgtccttcgcccactttttgatggggttatttgtttttttcttgtaaatttgtttgagttcattgtagattctggatattagccctttgtcagatgagtaggttgcgaaaattttctcccatgttgtaggttgcctgttcactctgatggtagtttcttttgctgtgcagaagctctttagtttaattagatcccatttgtcaattttggcttttgttgccattgcttttggtgttttggacatgaagtccttgcccatgcctatgtcctgaatggaaatgcctaggttttcttctagggtttttatggttttaggtctaacgtttaaatctttaatccatcttgaattgatttttgtataaggtgtaaggaagagaattttagaccaatatccttgatgaacattgatgcaaaaatcctcaataaaatactggcaaactgaatccagcagcacatcaaaaagcttatccaccatgatcaagtgggcttcatccctgggatgcaaggctggttcaatatacgcaaatcaataaatgtaatccagcatataaacagagccaaagacaaaaaccacatgattatctcaatagatgcagaaaaagcctttgacaaaattcaacaacccttcatgctaaaaactctcaataaattaggtattgatgggacgtatttcaaaataataagagctatctatgacaaacccacagccaatatcatactgaatgggcaaaaactggaagcattccctttgaaaactggcacaagacagggatgccctctctcactgctcctattcaacatagtgttggaagttctggccagggcaatcaggaaggagaaggaaataaagggtattcaattaggaaaagaggaagtcaaattgtccctgtttgcagacgacatgattgtttatctagaaaaccccatcgtctcagcccaaaatctccttaagctgataagcaacttcagcaaagtctcaggatacaaaatcaatgtacaaaaatcacaagcattcttatacaccaacaacagacaaacagagagccaaatcatgagtgaactcccattcacaattgcttcaaagagaataaaatacctaggaatccaacttacaagggatgtgaaggacctcttcaaggagaactacaaaccactgctcaaggaaataaaagaggatacaaacaaatggaagaacattccatgctcatgggtaggaagaatcaatatcgtgaaaatggccatactgcccaaggtaatttacagatttaatgccatccccattaagctaccaatgactttcttcacagaattggaaaaaactactttaaagttcatatggaaccaaaaaagagcccgcatcgccaagtcaatcctaagccaaaagaacaaagctggaggcatcacactacctgacttcaaactatactacaaggctacagtaaccaaaacagcatggtactggtaccaaaacagagatatagatcaatggaacagaacagagccctcagaaataacgccgcatacctacaactatctgatctttgacaaacctgagaaaaacaagcaatggggaaaggattccctatttaataaatggtgctgggaaaactggctagccatatgtag

SEQ ID NO: 989 - DNA, 357 bp, Homo sapiens
atggttctgaatgaatacctgatatgagtgttttctattatttcctcttacaaaatagaagaatctttgctggtgcctgaaacaaaattaattcattttccttgaataacctaagtttaaatatgggtcttttttttttccattgagaatcatagcattttacaacaggaaggaaacttaatggaaatttagtttaacttatttattttacagatgaggaaactaatggctaaaaattgcttttcccagctatttaagaaatggaagtatttttagtagagatggggttttgccatgttggccagggtgatccgcccacctcggctgacagagcgagactcatctcaaaaaaaaaaa

SEQ ID NO: 990 - DNA, 3448 bp, Homo sapiens
tgcttcttagtttgtaataccatacctcacagtaggtagaagaatgaaaacttctgcaggtgtgtaattttgaaactagtcctctaaaaattccctattactcctatagcaatctaataaaaactacctacatagttactgttttctttccttctttgccaaatgttttataataaatctcttaattacatacatttttctacttaagattaaattggaaatactgtcttagcaaaagtcttgggactatctaaactcccacacatagataaatctgatttggagagagaaatttaaaatatttaattaaaggtgatacccacattttcaagtttttaaaagagggagatggctttgtatgcttttgtgtagtttagaacagatacacattagtaaaagataccaataatcattagagctcaaggaagttattaggtgcagcctctggagccatactcacgctgcagtgcataatgggaaaattaggagcattaataagaaatttcagtagtgtttgtaaggaaaataagctacttactgagatctgtttcttctattgcatgtttgcttttgagggacagcttctgtcaaaagtgaaatcatcaccagaactgggcctgttaggaagaatagggttttatttactttttatgtcaattaacttcaacaaaaaggccacgctggctgctgtcatgccatctgggtatgcattaaacattaatgatgatcagcactgaggttctatttatcttgatttggctttcataaagtttgtcagaatggtgctggaggaccagaagtgctaaggagaaagaagctatgggccaagttaaagaatttgaatgcaaaggccaggtcaatggagttttcataaactacataatttaccagggtttatctcatcttctcaatacatagatttaacaacatggaatactctgcttttcaagagctgcgtaagctagtcctgagataagatgttcaagagagcatgctaagttgcatgtgctagatgagagacacctttacagcccctccgctccaaccagaggtgacacaggaagctctgtaaagttcaagtaaagcttgaacacaggaacactacaactgccagatgctgaggagaatcaggaaagcaatgagctagactctttttttagtcaattaagtgggttgttttagatgtatagagtattgatatgagttaacactttttagtagatggcaaagtgggcttgatgttcaaaagtaatgttcgagttagggttcatggtccctttctcagtaattttttcttaataaaagtaaacactggttcaaagacaaatagcaagtattccctcctgtgctatttatagagggctcaattcgtagaaaggcataccctccaatgcaattctgtggctgtcccttacagtggtttcagaatcacgaaaaaacagctagtaaataggatagaaacaataaaagaaagagtttagaagttccctgtgagcaatctgtgtgtcttcagcgagcttgaaccaaagtcttcatatcctgacccactgaattataagcaattgctacttgcccatcttgccaaagtagtccaaacacacttcaatgaggacagttatatttagcaggtcctcacccctgcaagagacagcatatcctcactattattattcatgtgttattggcaaaaacatagcttgcatctttccagaggcagagtttcaaagacagggttttctttgagacataagcacattgcttaagtacataacaaggttattaacacttgcactcaggggaaaggaaatagctattgcaaattaatgtgaacaacttaataaaataagctgtttgtgtatatgaatttagctctaggtaagcaaaatgcacacatcatataaaaataaattgcaatgatcagaccaagtggctgtgctggacatcaaagaaaagacatgctgttgccatcaggagaactctttcttatatgcgatagccaagatatcttctttaatatgaaaaaagttaatttctgaatttcaaaaagagtaagattagctaattggtcttcctaatttttatgcctttagagtttttagtctattcaagtagaagagtccagcgaggccaaagaagggttacggtgttcaagttctggttgttggagtttttagcccagagtgacatactgaaatcagtaaataattattttataatgacacagcacaactgccttgttatgaatttttcttaaatgcatatatactgtatttaaaattaaaatatagataccaatttaccaaagatacatattactaattctaagcaaaactaaaaaaaaaacccaactcatcataatttaagaatcaaaatgtagtttgtcttaagaatttagtggttatactggaaatgcattttcaactcctatgttctaaagtttatgttcaaatggtgccagtgaatttttatatgaagggaaaatgcctgctttttttttttttttaacagatgtaatttcacttaaccctttgcgctttcccttagttgtcatttaacatacaatactggctttacttatctctagaaagaagaaggcatgctacaaataggaaggaattgtaataatgatatttggcctctactttgtcttagctgttaaactgtttttagtatttttgttaaatatttgcaaagggaagcattttctacagaggataattaatttcaagaaaaatatcttgagttttaagaaataaacatctccagaaaaggagaaagtcgattttataaaatgtcgcaactctccaacatttggggtagtgactccttttttgttaggacatttgaaactagcaagcagccattgtttctaaagaattctggcttcacattgactcatgtttctttcactccattttgaaatagctaaaaatcattaaaactgtaaatattttgttgcttgggtaagcatcttctgggaactttgtatctatggtatataatcatagaattttatattttcatataaagctaatttttttctagtttcaactccgtcatagttttttttcctttttgtggtggatatgtgaattcaactttctgtgtattgaagtagcaaaaaccatctttacattccaaaagaatccaacatgtgttatttctttgaggcagtgattgtgaaagttgggttttctttttaattccattgaccatttgtgcaataggaattagacataattagtcactgaaaacattcgtcacattgacccatttggaaaaagtgtgctttttttttttttttaaatttgttcagggggaggggttttgtaacctgaaatttttccctttttcttctgtttaaactatatcaaatcattctattatagtgttatttaatatgtaaattgtattgctatacataaaataaagtatggtttttgatgta

SEQ ID NO: 991 - DNA, 1563 bp, Homo sapiens
taatgtagagggttatttattttcatttcattaccattcgtgtaaggtgtgtgtgtgtgtgtgtgtgtgtgtgtgtgtatagctagtttctctatagaaattatatggaagagtaagaaggcttcactttaaaattcatgtttttaatgagagtattttctgaatatgagacacttaccctcatttattttggccagggtgttggaactcgccataaggcattgatcaggattatggtttcccgttctgaaattgacatgaatgatatcaaagcattctatcagaagatgtatggtatctccctttgccaagccatcctggtatgttttgattcctctaatgccatcccaacaaatgaaagttctttttgcaagatcttcaaggagaagagttgacttattgtatctataaatttaatatgtaagattaatttaatatattatggtgtgtacttcatgagtaaattgaactttcactggtaaaatctactagtgagttctctactgaaatactgggtacatttttcaactaaagtcatggaaacatttagtttcccatgcataaattcagcaagcagaatattctagtgttccccctagggtagatagacattgtggtttattttgccattaatatttgtcagaggattagaaactccttattcaaaatatttatcttaattctatcacatgtaaaatgtttaaaatttatgttcaaattgtctcataagaatgttaaaaaataagacaaagaacagtcaagggttttggacttactgaaaggtagataacgattcaaatttaattaattagtcatattggataactaaaatctacccagaaaatgtgagaaaattacaggcactatacatttctcttcttctggtgagtgaatcaggtatctcctcacataagatatgagattatattgtgttatacttatttaattttgtgtgatatttcattcatagaaaataatggcactaatataaaacataattaattcagaaaagtttgtaatctcagtcttgaaggctattgcttttttatgcaatgataaaaaatcagttatctgttgtatatattgtttaattaagtgaatggtaatgtgtaatctcatctacagctaagtctaaaaataattcttctataagtaaaaaaaaatagagaattatggtttcgactaacattaagtatacctttttttgaatcaacaggatgaaaccaaaggagattatgagaaaatcctggtggctctttgtggaggaaactaaacattcccttgatggtctcaagctatgatcagaagactttaattatatattttcatcctataagcttaaataggaaagtttcttcaacaggattacagtgtagctacctacatgctgaaaaatatagcctttaaatcatttttatattataactctgtataatagagataagtccattttttaaaaatgttttccccaaaccataaaaccctatacaagttgttctagtaacaatacatgagaaagatgtctatgtagctgaaaataaaatgacgtcacaagacaattgg

SEQ ID NO: 992 - DNA, 391 bp, Homo sapiens
tggatgacagggcgaggctccgtctcaaaaaaataaaataaaataaaaaagaatttaaaagttgtttgccgggcaagaagcatactctctttcctgttaaaatggccaaaagagaacctctttctcccgcctttctaccactgagcagtgtagtatgaagatgtgtgattcgggattgctatatcagtcaaggtcccagcaggaagcagatggcacactcaaactggacaatttgaggagcagttagtaagtggactgttggcggtgcacacctgtaatcccagctacttaggaggctgaggcgggaggatctcttgaacccaggagttcgaggccacagtgaactatgatctccagcctgggtgacagagtgagaccctatctctattta

SEQ ID NO: 993 - DNA, 4137 bp, Homo sapiens
ctgctcccgcgcctgtgagcaccatgctcccctcccctcccacctcatctccgagataaaagtacacggctaccctactccctttggcttccctgctcccacccccctgctctgttcctggtttttcctttctcacatcagctccaggatttttatgtagaagctgtctgtgctgtccagctagtccccgtttcactcattactgaatgggggttaggtagggcagagctgaattgaatggttttcctaattgtcactctgactttttaatcatccaaaaggggaaaagggcagctaggacatttttgactaaatgcttattatgcagatggtgatgagagtgcggtggtgaatggcttgatagcaaatgagtctctaggaggcagtcgccccagtatttggagacaatttcagaaatgttctatgtgggaggtgatgcttgtttagttacaggcagtaagaataaaccatcagttctcctaactttattttaaaactcaaagactctctagagcaggagtcaagaaacagcccatggactgaagcgagccagccccttgttttgtgagtgaagttttagtggaatgcagccatattaatttgtgtacgagctgcctatggctgcttttgtgcaactactgaacagcagagttgcatagttgggacacagactttatggcctgcaaagcctaaaatatttactgtctggttctggtctagggtaatgatctaggaatagagattggaatagggactataaggtacaatgactaaaaaatggagattatgtaggagggagaggaagaggcttagtggccatttgatactggttgtcaatatgcagaggatttctgtattgaaagctcagctctccagagaagatgaacagagaggcttgagagacagacgatactaagacggtatctgataggccggtttccttacatgcttcaagaataagatgccctatgggagttggttagctacagtttggtcccaagttgagtgacgtttcccatgctatggcagcctactgtccctcagctgacctccatctgttccctcttttgttgtccacatggttgcttcccctggctgtattatcctgcccaagtcccaggtctaggggcaacttggctttactcaccatatcccggggcccattcttctgcctctctccactggctgatccctgtcccaagccaaattctctgtggcatcctggcccccagcgcaaggtgatatctccccctgctcttcacaggacgtgctctccttggccgtggggccacgggaccctgacgagggagtctccccagagcatctggaacagctcctaggccagctgggccagacgctgcggtgccgccaggtgagctgtggcatctgccaccggggggcttttttctgtgtccttgtgtgagacctgataaccagagccacactggctcagggccagttctcgcagcagtaagcatggtgatacctatggtctctctttcccccccaccccaaccgcagttcctgtgcccacctgctgagcagcatctggcaaagtgctctgtggagttagcttccctcctcggtatggttgctttccatcaaatccctctcttgcctgatcccccaaatctcagggttgggtacaagcaagattagaaacagagccctcttctgtcccttttttttttttttttttttttttgagacggaatcttgttctgttgcccaggctggagtgcagtggcacgatcttagctaactgcaacctctgcctcccgggttcaagcaattctgcctcggccaagtagctgggactacaggtgccttccaccacgcctggctaattttggtatttttaatagagatggggtttcactatgttggccagactggtctcgaacccctgatctgcccacctcagcctcccgaagtgttgggattataggtgtgagtcaccgcacccggcctgcccccatcttttaaagcttggctttcctctttccacagttgcagatcaaattcctatcctagggcccccggcacagtacaggctggagagagggcaggctcgaaggcttctgcacatgctgctttccttgtggaaggaagactttcaggggccggttccgctgcagctgctgctgagcccaagaaatgtggggcttctggcagacacaaggccaagggaggtgagtcagacggaacaagaagccctctgcagtcacactctgaacatccaccacccttgccccaaactatgagctgctctgcatcctttatttccccttcctgttccacacagaaatgggctccatttatccatctcaagtctcttcccagcagctctgccctttgagatctcaatctctgtcatcagggtcactctgtcgtcctcctagcaaccctgacctcggtgtgttttgcagtgggacttgctgctattcttgctacgggagctggtggagaagggtctgatgggacggatggagatagaggcctgcctgggcagcctccaccaggcccagtggccaggggtaaggagtctcctgtcttttaggtggagagagaacaggtgttacatatcccatctgtcctgaaaggaagcaagtgatggggccaaactaagtggatttttgtcaagagtcttcagggccaccctgaaattgtcccgatttgagtagttattatatgagggactgtgttagtgggaagacggacgaaaggcaggcagttagttggaaagcagcacagcccattatatgggtttttaaaattagaataacctggattttaacgggaataataatttcaagatgaagtagatgcactcagtagtactcaaaaactggtcaagcctgtgcctccatcagagttcgctccctgccataacttcagcctcccagagtactaacaaacagacaaggtttcatgtccatttcagtgtggagggcagttgagaaaaaataatatagccagccaggttgtggtctttagtgacaaaggatgagccattgagaattattacatgctgccttttccctcatctttctatgtattccaggactttgctgaagaattagcaacactgtctaatctgtttctagccgagccccacctgccagaaccccagctaagagcctgtgagttggtgcagccaaaccggggcactgtgctggcccagagctagggctgagaagtggccctgccttgggcattgcaccagaaccctggacccccgcctcacgaggaggcccaagtgcccaatgcagaccctcactggttggggtgtagctgggtctacagtcagacttcctgctctaagggtgtcactgcctggcatcccaccacgcgaatcctagaggaaggagagttggcctgatttgggattatggcagaaaagtccagagatgccagtcctggagtagaagaggtggtgtttgtttatctcttggatactaaatgaaatgaggtgtgtgggcttgtcaacacagaattcaagcctcatttgctatcccagcatctcttaaaactttgtagtcttggaattcatgacagaggcaaatgactcctgcttaacttatgaagaaagttaaaacatgaatcttgggagtctacattttcttatcaccaggagctggactgccatctccttataaatgcctaacacaggccgggtctggtggctcatgcctgtaatcccagcactttgagaggcctgaggtcggcggactgcctgaggtcaggaattcaagaccagcctggccaacatggcaaaaccccatctctactaaaaataaaaaaattattagctgggcatggtggtgtgtgcctgtaatcccagctactcaggaggatgaggcaggagacctgcttgaacctggaggtggaggttgcagtgagccgaggtcgcaccactgcactccagtctgggtaacagagcgagactttctagaaaaagcctaacaaacagataaggtaggactcaaccaactgaaacctgactttccccctgtaccttcagcccctgtgcaggtagtaacctcttgagacctctccctgaccagggaccaagcacagggcatttagagctttttagaataaactggttttctttaacaagggcttgatgtctaa

SEQ ID NO: 994 - DNA, 337 bp, Homo sapiens
tgaatgcctgggaaccaaaaaagctttaaggaatgctttctcggccggacacagtggctcacacctgtaatcccagcactttgggaggtcaaggcgggaggatcacttgtgctcaggagtttgaaccagccggggcaacatggggaagcctcatctttaaaaaatacaaaattggtgaggagtggtggtccatgcctgtggtcatagctacttgggaggctgaggtcagaggatcacttgagcccaggaggtcaaggctacagtgagccatgatcacaccactgcagtccagcctgggctacagagcgataccctgtctgtctcaaaaaaaaaaaaa

SEQ ID NO: 995 - DNA, 26013 bp, Homo sapiens
tgtgttaaatgggcttgccaacaatatggatgatttgaagataaacaccgatattactggtgctaaagaagaactcctagatgacaacaattttatctcagacaaagagagcggagttcataagccaaaagattgtcaaacatcatttcagaaaaataatacgttgactctgcctgaagaactgtcaaaggacaaatctgaaaacgccttaagtggaggccagtctagtctatttatacatgctggtgctcctactgtttctagtgaaaactttatcttgcctaaaggagctgctgttaatggaccagtttcacactcctccttaactaagacttccaatatgaataaaggcagtgtttcattaaccactggacagcctgtggatcagccaacaacagaatcttgttcaactttgaaggtagcagctgatcttcagctgtctacaccacagaaagcaagtcaacaccaagttttatttttgttatcagatgtagcacatgctaagaatcccacccattccaataaaaaactacctacctctgcttcagttggttgtgacattcagaattcagtagggagtaatataaagtcagatggcactttaataaatcaagtagaggtgggtgaggatggtgaagatttattggtgaaagatgattgtgtcaatacagtaacgggaatttcctcaggtacagatggatttaggtcagaaaatgatacaaactgggatccccaaaaagagttcattcaatttcttatgactaatgaggaaacagtagataaagctccacctcattctaaaataggtctagaaaaaaaaagaaagcgaaaaatggatgtaagcaagataactcgttataccgaggattgctttagtgattctaattgtgtacccaataaatcaaaaatgcaagaagtagactttctagaacaaaatgaagagctacaagcagtagactcacagaaatatgcattatcaaaagtgaagcctgaatcaactgatgaagacttagaatctgtggatgccttccaacatctaatttataacccagataagtgtggagaagagagttcacctgttcatactagcacttttctttcaaataccttaaaaaagaaatgtgaagagagtgattctgagtcacctgctactttcagtaccgaagagccatcattctacccctgtacaaagtgcaatgtgaattttagggagaagaagcacctccacaggcatatgatgtatcatttagatgggaatagtcactttcgccatcttaatgtcccaaggccatatgcttgtagagaatgtggacggacatttcgagatcgcaattcacttctaaaacatatgattattcaccaggagagaagacagaagttgatggaggaaattcgtgaattgaaagaacttcaggatgaaggaagaagtgcacgattacagtgtcctcagtgtgtgtttggtaccaattgccctaaaacatttgtgcaacatgctaaaacccatgaaaaagataaaaggtactactgctgtgaagagtgtaacttcatggcagtgacagaaaatgaattggaatgccatcgaggcattgcacatggggcagtggtaaaatgccctatggtcacttctgatattgcccagagaaaaacacaaaaaaagactttcatgaaagactctgtagtaggatcatccaaaaaatcagctacctacatatgtaagatgtgtccttttactacttcagccaaaagtgttttaaaaaagcacacggagtacttgcattcatcatcatgtgttgattcatttggtagtcctcttggacttgataaaagaaaaaatgacatccttgaagaacctgtagatagtgatagcactaaaacattaactaaacaacagtcaaccacatttccaaagaactctgctttaaaacaagatgtgaagcgaacatttggatcaacctcacaatcaagtagtttttcaaaaattcataagcggccacacagaatacagaaagctcggaaaagcattgcccaatcaggtgtaaacatgtgcaatcaaaacagctctcctcataagaatgttacaattaaaagcagcgttgaccaaaaacctaagtatttccatcaagcagcaaaagaaaagtctaatgccaaggcaaatagccactatttgtatagacacaaatatgaaaactataggatgatcaaaaaatcaggtgaatcatatcctgtgcatttcaaaaaagaagaagctagttcattaaattctttacacctgttttcatcatcaagtaattctcacaacaattttatttcagaccctcataagcctgacgccaaaaggcctgaaagcttcaaagatcacagacgtgtagctgtaaagagagtaattaaggaatctaagaaggaaagttctgttggaggggaagacttggatagctatccagattttttgcataaaatgactgttgtcgttttgcaaaaacttaattctgctgaaaagaaagatagttatgaaacagaagatgaaagttcctgggataatgttgagttaggagactacactacacaggccatagaagatgaaacctatagtgatattaatcaagagcatgtaaatttattccctttatttaagagcaaagtggaaggtcaggagcctggagaaaatgctactcttagttatgaccaaaacgatggcttttattttgaatactatgaagatactggaagtaacaactttttgcatgagatacatgatcctcagcatttagaaactgcagatgcttcattgtcaaagcatagttctgtttttcattggactgatttgtctcttgagaagaaatcgtgtccttactgcccagcaacatttgaaacaggtgttgggttatcaaatcatgtcagggggcatcttcacagagcaggattaagctatgaagcccgtcatgttgtatcaccagaacaaatagccacaagtgacaaaatgcagcatttcaaaagaactggcacaggaacacctgttaaacgagttagaaaaggtaagttctccatggggatgatttgggctgataggtctgtgttctaattctgaagatttaaaagttttttttgaatttagtctttattagaatcataattttatgtttcagaattaactcattttagggtggtcagtttatataagaaagtctgatattactcttaaaaatttttttctagctatagagaagtctgaaaccacttctgaacacacttgtcagctctgtggtggttggtttgatactaaaattggattatcaaatcatgttagaggccacttgaaaagacttggaaagacgaaatgggatgctcacaaatctccaatctgtgttctgaatgagatgatgcaaaatgaagaaaaatatgaaaaaatcttaaaggcattgaacagtcgtcgtattattcccagaccatttgtagctcaaaaacttgcatcaagtgatgactttatatctcaaaatgttatacctcttgaagcataccgtaatggcctaaagactgaagctctgtcagtgtctgcatcagaagaagaagggctgaatttcttaaatgaatatgatgaaacaaaaccagaactgcccagtgggaaaaagaatcagtctcttacactcatagaacttcttaaaaataaaaggatgggagaagaaaggaattctgctatttctcctcaaaagatccataatcagacagcaagaaagagattcgttcagaaatgcgttcttccattaaatgaggatagtccgttgatgtatcagccacaaaaaatggacttgactatgcactcaggtaagaggacgtttatgactatgctatacacagtttaaatgcagttcaattatgccttctttaatggaatctatgtggaaaatactttctcacaatcttcctgtttaagctgctttttttttttacagagcacagattggttattctactgtcatttctgtataactcatcaattgatgctcattagcactgagttctctgtgcctcttttcttggtctgaatgtaaggtgagaacaaaagcagaagaaaaccacacacacacacaataaaaacaacaaacaaaaagctgatctgtaaaaataaaacttgctctggctggaggatggttgtggatgggaggttgatgttcaaaagcatagcattattgaaaaggcatacctctgtcatatttttgccagttctccaaggtgatcatgttttcaagatttagctgttggtttttccactgcttaggtaaaacaaaacagactcttaaagctgaatggattggtgtctgttgtgattaacccaaagaaacatctccctctccaattcctcattgtattgcggaatagtttggttttggagaacagttgtgaacataaaacatatttgtttggggttttaggttttaagatagtgctctaatggaacaggacagatgatttagcttagtgctggtgcaccaatagttttttccttttgaaaggaatattttgtatgtattggcaaataatgtggcagataaagtagccaaactttattcagtattgccaagtgtggtttatacttttagactagaaaaattttaagtgttttttctagatttctttttgaaggttaatgttgaaggtttatgtaaatggtctcatgattagagctctaagttgaatgtgtcagaggtaatagttaatggattaataacgactaacattactgtaaagtaatgttgtttatttgctttggggcagacattgtgatatcccgaatagttgtaatgcagttttgatttaaggaaagataactttgtattgtaagtggtctggaaagcagtttatcttgtatgagcttctgtttaatccggctttttctttcgaataaagagtctctgaaagtcaatagctttcaatattttttcagaagggtaaaacgcagggaagatgtgttagctgtgttgaccaaggggtagtatacttcagagatggaaagcatatttgtggctatcacagtaatgctgaagaaaccagttgaaatgtgttgggggagtgaggattgtctgagaagttaggagtttcttattgtttgaacatgtttttcctgtgatgactaagatgttagcttgttgatcatttatttagcacaaagattttagcaaaaaactttaaatcattaactttcattattgattgcgcattcagagtaatgaacataaaataccctaaataaaatgttgtgtctaacagctgttcagtggtgtgttttaccaccttttctcccagccttcatcagaaagcctaatttagtattgagacttttacggttttgtgggtaaaacactttaattaccactttgtcaactagactttttaattctttttattggtaatgttgtaagctttgaaacttctcaacagaaccgtgttgttcaaatcacaggattgtattgtagtaggtttaagaaataatctgcgtaacacagaaatctgcaagaaagtaataataggtgtatatccagaggagctcaaaggttcaagtcactcctcgtctacctttccaaagagcatgagttgactctaaatactaactacaaactaataacagttaacttaatttcccctccttattttaagttaacctatttcattgaacgttttgaaaaccatctttattgtggtgcttttctacactctttaagctaagaaaatttcactttttgaagtgagaactggattatagttttcttttgaatgataggtatgcctgtgaagcttagaacatgtgtgcattgcaatacgacgtttacaagtgctgttagcctgtccaaccacttacgcgcttatgcacgaaagaagagtgctggacttttgactggtacaggtatgtttgaacagatatcacagcaagtctgtttgatacaatacactttttttttccccaccagactggtgttaattcagatcatatttatagctttctttggtaagctgcatttgagtctgaatacccattgaatttcagcaacttgtaaactgttagatgtaattctaagcaagttaatctttttcttttggctcttattgacttaatttgggggaaaaaaaattaacccaagaggtgtggaactttgagtctaccttaatcccatttattttttagaatactatttttgatttttaaattgattttagattccagtaaaacacctctctttatagttctagtcgggctcagtggtgtgcccctatagtcccagctactcatgaggctggcaggaggatcacttgagctcaagagttagcggctataatgtgctatgattgtgcctgtgaatagtcactgcactccagcctgggcaacatagcataaaaatattgtagttctagcttggggaaatcctttattagaaaaggaaattatagggaaatttcaaaatgtagacttgattaggaaactaagcaaactaatgaattttcattagtctatagattagatctttgaaggggtgagccttaataatggcttgtgttgacaagcgaatagatttttcttttaatacttcttaaatatattaaggattaataaatttagctatgcacataagtgttaacatgcacatttctgtgttatttttggttggttagcccaaccttgcagatacctcttaatactgctcatctgtgaaaattttattagcttacttatatgtaatacgcttcttataacctacaaaatgctttgcactttcatttgtagtcttttaagctaccctgcttcagcaaatctcatttccctcacatcttaaaatataccctctttttgacatagatctacataaattcttttgcctaaaattctttccaatcattttatttctcttgctcttttttagatcactgcctcctgctttcttctagttgttttcccagcttttttgttcttcctcatgtcctagaacttagatccaatatgttcttgctttcaaaaaaccacttatatttatactagtgtctttcttctgcttctttgcattcttccttaacttgatatacaaatgaccagggatgaatgttgacaatttatattaaaaagagaggagtggggtgagttttagtctactggattaggcctcctactctgagattataatttttatataccctcacctttatcaggcttggcaagtgattgcagacattagaggtggggaacaataaaaataagagactatacaagtaggaaatcattattgttaccatacttgctaacttttattgaacatttactatgtgtcaggcactatgctatgcaatttacatgcataacatttaatctttacaacagccatacaagttgtaggtactggaattctcttaacgttttataggaaactaggacttaaagaacttaatttgctcaaacttacacagttaataagtagcaaggttgtaattcaaatcagggctatcttacctaatctttgtttttaatcactattctctaccttacacaggcggtctatttttgaatttcttatttttaaaataagaaattgaaataaaaataagcaatggaaaattctaaaatgaaggtgggtttgttcatttatttatttatttattttgagacggagtctcgctctgtcacccagattggagtgcagtggcgcgatctcggctcactgcaacctccacctccctggttcaagcaattcccctgcctcagcctcccgagtagctgggattacagactcatgccatcatgcctggcaaatttttttgtatttttagtagagatggggttttaccatgttggacaggctggtctcgaactcctgacctcaggcagtctgcccgccttagcctcccaaagtgctgggattacagccgagagccaccgcacccagcctgaaggtgggtttaaaatggggactattctggtgaagactgaataaataagagtctaattaaaaagagcagagatccaagaagtgcttaggcctaaattagactttagaggagttaatgttccattctgattattcaagcagattatgcaaatatccaataaggcaagatatctccagtccagattttattagtccattaaaaaaatgcttttacttcatctgaaaattctgcaaaacacaggattaattacttataaataactggtagtaaatctccatttaccaagaatgcacttatgaagattatctaaaaaatcttcattatcagagagaaaagtaatgtaggatgactgggaatatgtttaggtcctgaagaataaaagagggtgttattttaaaaatatgattaagtactaccaaaatattagaagtactaggaaatagaaagcgtgtgtttggcagtcctaggcaaagaaaaggaaaatgagaaactgaagaaagcctagggtcttattttccacacccagtagccacttttgagaaactttaaaaactaatgcttctttttcttggaaattctgaaacattttttccctcattaaaaaaaatcttcttgatcagtagagctatacagatgtctttgctgcttattcatgccaactaagaagttttttttcaagctttattaacttttctgttttccagatagagaattctgtattgtatttacaaactccacatactgattatcccccatatcaatatcactgttataaagcagtgttcctaaaaacctatggccctagaaggttccacttggttattataagtgattcattaattcatatgagtaacaggcatcatttttcaagaacacatgatcttttaatgaataaaatgcaaattcatttttataaaatcttaccttagtatatcacaaaattggaacaatgtaaagggaaagtagataggaataaagcctccctaaccatgtccagtatgtgtatttctagtttaagcagtcttaattcatgtagattttaagttgtgtggtccactcttgaatacaaagcttagataccctcagactaaatggtaaaggcctgcttttggttacctgtgatagaataaactttcaagccttcttagaagccacagctcctggtcttttctgtgggaactggtgaccttttgagggaagaaaaatatttcttctaacttataatctcttcaagtatcctgaatacactgaaaaggatatccctcttcttcccaaaatacctgtttactggtaacttaaatacttctaatgtgatggttctcaatctttactggggtcaccgacatctttgagaatttcatgaaagctgtgggccccatcccagaaacatgcacttatttgttctcagataaaaatttttgtgtgtatagactttgcgtatctcctgaaggctatcatcaatttgtctgatggcaaattgagaaaggagagatgccagaataaaaggaaagtagaaacagaactaggaatcagaagccttaagaagttcttttttttttaagagcagaagatgcttaaaatgcaagaattgcataatagcaaaactaattgtggggtcattatcttccctaatatttgtaaaaggaaccgatgggggaaataggaaagatttagaattgaagatttggaagaggtgggcagacttgggagagttaaattgtcataaaagaataatttcacagattaaagttttgcccagaactgtcccagtttatcttctgttgggtaggttcaaataaattgtttaataatttttctgtgtcttcacttgtagataatttatgaagctgttttacttcctttccccgatcaatctttatcaaaatagactagaatcaaagggtttattttatatcctatattgtaaatttaaggcagacttcttattcaagagtttattctagttatttatggaatgcagtaatggtaggggttttttttttttttgagattttgttctctttaatgttttacatgctcatacagatttttttctggttaattttccatacagtttaatgagaacattatatagttttcattaaatattgaaattttataatgtagcttatattaattacttctggactttttattttactgattagctttttttgtgcctaatgttttaattaaatgatgtatttttatgctagccatattaagaacatagttctattaagttattaatggagtgactatacatactggtttaccttgttgtcacacctaagtactagtgcctcttttactctcataagtgtcctggattgaatgataaattaatcatcctggttattaaaattgctaaagcatttaaaattaaggtaaagcatattctatcaacctaatctgcaatcaggaaaaaaaatatattttgaggtcaaaataagagtgaatttcaacaggtagggaaagggaaatacagagtagagagaatgttgttaaaggaagtagatctgtcagatgaatgccacaatgcttttctatggtagatagcatgttgttatcttttgtaaagaagaaacaatgatggtagcagtcagcattttaattgagactttattttatatcttgaccacatgtacaaacttacattaatacaaacacacaattccttgtgtactcacctaaatgtactttaatattttcttttttattatattctttgttgtgaaaaattaatgctggtcatgagccagtaaattgatttgctacccacttaagaagtcactatcatagattgaagacactgccctaactgcctctttctcttaggggttggtactgaccaatggtagtagtatcttagatgtcataactcttctgtggcagcaggtgaattttctatactcattctatccacatttttctctctagatcacttttgtaaatcaaatgctaacctctgggacttaaagtaattggaaatttctagttactcatttaaaattaatgcaagaaaaatatttttatatttgggaggggcttcatttcattatcttcagaacaattttgtgtgtgtgtgtgtgagacggagtttcactctagttgcccaggctggagtgcaatggtgcagtctcggctcactgcaacctctgcctcccaggttcaagtgattctcctggctcagcctcctgagtagctgggattacaggcacacgccatcacgcccggctaattttgtatttttagtagagatggggtttctccatgttggtcaggctggtctcgaactcctgactttaggtgatccacccgcctgggcttcccaaagtgctgggattacaggcgtgagccactgcacccagcccagaacactttcttgatacgttttggaagtaaagcccaattgttgctattctacaacaaatgacttatccatcataattatttgacttttctgatgaggtcaataccactagtgcaatatattaacgtttttaaaaaatcaagtcagtgttttatttttcataccatttacttttaagtgtaatcgtagtaggtttcttttgcctgttttcagctttaatgatataattggccacacaggactgtaacaagtactaatgaacatatagcacagtatcaagtgctgaatgggtttgtaagccactagaaaagtcattcttatgttgtggaaagtgctatgggagcactttctgatgtgatagaaaaaatagtattgtgaaagcttcccaatgtgcattaaattatttgttcattcatgagtgtcactgtagtgtcttttaaaaataatatagtattgcatgtttgaaaaattgcatgttttcatagtggttcattcagactgaaagagtgtaagtagaaaattttgatcttcttattaagattaaactccaaatgagcaaacttgcttctgcttaaagcaaactccttgacaattcttccagactgggctgaggagggtatgtgaaaagtatgagacatgtctctgctgtcagagaaattaggaaaggattgttgacaacatacataaaactatcaaaaattgaaaactatgcaagatagtatacaactaaatggcatattggctttaagtgttgtaggagttcaggttgattattttagtctaagcctccttttgagggcagctgggaattgagattccttttttttctgatgcccttactgtttgtctcattgaattagagcttgtaaaaaacagaaaaaataaataaataaaagtagttcatgctggtatgcttcttgtgactttttaaatgcaagagaacaacaaaaccagcagccatacaaaattttattcattcaacaaaagtttgagttcttgtaccaagactgttcatcgctgagccagtaaagatactgcactccagctgcataaacataatataacccagtgggaaaagatcaagtatgccattacagaagggtttatatggtttcagccagaccctgaagttgaaggatgcagtagagttttaggaagacgagatgaagtgtagaatatttcaggcagagaagaacatagtgtggacacaaagggatgaaatttggacttcaagtgtcaggagtggaacttggagttcaagtgtcagaagatttggttacagatgtttggtaaaattgtagtgccagaaaggtggggttggtgctttgaatgcttggtaaaaaaaattaggaagtcattaaaggatgttttaaaaataaggaggccgggcgtggtggctcacacttgtaatcccattactttgggaggctgaggcaggcacatcacctgaggtcaggagcgtgagaccatcatggtcaacatggtgaaaccctgcctctactaaaaaaaaatacaaagaactagccaggcgtggtggtatgcgcctgtaatcccagctattcaggaggctgaggcaggaggattgcatgaacccagaagctggaggttgcagtgagccgagattgtgccattgcattccagcctgggcaacaagagcaaaactcctcaaaaaaaaaaaaaaaaaatcagcccagtgtggtggtgcgcgcctgtaatctgagctactcaggaggctgaggcaggagaattgcttgaacctgggaggtgcaggttgcagtgagccaagattgcgccactgcactccagcctgggcgacagagtgagactccgtctcataaataaatacaaaaggaaaataggccaggtgccgtggctaacacctgtaatcccaagcactttgggaggccgaggcaggcggatcacctgaggtcaggagtttgagaccagcctggccaacatggtgaaactccgtctctactaaaaaatacgaaaaagtagccaggcgtggtggtgggcgcctgtaatcccagctactcaggaggctgaggcaggagaatcgcttaaacctgagaggtggagattgcagtgagctgagatcatgctgttgcactccagcctgggcaacagagcaagactccatctccaaagaaggaaggaaggaaggaaagaaggaagtgaaggagggaggaagagagggagggcagagagagagagaagaaaaataagggaatggtatggttaaacttatattttaaaaagcctttcatgagacagagaaaagatgggtctttatatttcttagctataacttatttctatagtattgttcttcattaagagcatatatgtgtatacatttatctgcacagtaacgtatcatttataagtgattagcaaggtaacgaattatctgagttgagtaaattctctaggtgactgaagaatagtcctttaactgttaataacttgatttttcctaaccattttggtggttattgctccaaaatgttgttcttatttttgccttgagtagcttggatataatttaatcgagtattttgggtaacccttatagatactctactaattgttttattattccagcaagaattaggctatttctccaccatacaaaaaaatgatcggctgattttttcactaattcaacaagcacttttttcacctccaactgtgctaagtatgcagagatacattggatcttacaatacagtagaagcacatatatgcataactgtaatacaagacaaattgttaagtgccattggagaggtatgcgtgaaatactgtggaatttcagagaaagaggaagacactttcagctagactaggaactcccaaggcttttggaattagcatttgaatggaccctgatgtatagctaactgaaatggaaatgggggtcggggtggggaagagaaatgcctgaaagagggagcaaggtggaacaatgtgggaagtttataggaaatactaggaagtaggaggtaagggaattgagttggactggtaaagtgagtcagatagatgacatagaacgctagtctaagatgttggaattaactttgtagtggggaactatttgaatgcagaatttgtgtaatgcttttgaaattgctttttaaataaaggatttggcagagaggaggaaaaattgcagggtagatcattttaagagtcctgtaccaggtcagtgacattaagaatgtaaaggaggggtactagatgtatgggtaatattatggaaataaaataagcaggatatggtagattagagttaagagatgactcaagattttaaatctgagtgggaggaggatggttataccagtacagttaatcaatctgctaccatgctgtctggtagaagggcaggcttcattacttctctgtcatttactagcaacacttcaacatccagctatccactataacaaagtatcaccttaaaagcaggagatctacaaatttggaaaagagagctttatttcttaggaagcttgaagcctgcaggcttggaagtgtatcctcagacagagaccaaaagcaagcccttcaaaggaggaagggtgagacaggaagttatgttgaatgggttggctaagtatacatattcaacagattataggaggagctatgaatattcatgagggggtgcacacaagcttagtgtgcacactccatgttacatacatcccatgttcactttgagttggagacctaacatttaatcatagtaaaattaaggtttacatgtcaaaaggtgaaacagagttcataggcatcctatgtgcagccttcatggaccagctagaaccagttggtgatctcttatcagtaaggaatgctggtcagttcaaaaccacaaaaacagagtggagtctggcttctgagttaggcaattggttgatatcagtggggagcaagtcttttgaaagggttggtttctttttaactcttaggaaggaaagttttatggtggttagtgagggaggggacctaacgagacttgctttacctcctgtcccatcatggctgggaactcaatttttaaggtttctctggggtcaccttggcaaagaggagggtgtccattcagtctgctgtagaacttagaattttatttttatttctcaaaagcaaataaccacacttgttgaatcagtaagtttgtttttaggagaatatagcctaagagttacaccattgtagcataaaatacttaaattttatgatgcttgttttttgctgctcattggtttcataaggaaggtgatctattttgactgacatcttgtttttcatgcaagtcttatctagtttcctagcattactattggtttaattatttactaagtttctgggttttgcttttttttttttaatatatgtttgggaatcttaaatatatctaattatatcttcagttataatgtttgtgtttgctatgatttttattctctaagccttaaataatgagattcagaaaatatcattaggtatagagtttattcaagcccaaagcttgaggatggccacctgggagcataggttcaagttgccctggatatacactgtgattagcagcagttacaagtgaatttttaagaaaaaaagcggtttctatgtttatttaccaagaatttacattaagataacgtaagctatcgattggctatacattgttctttgtatcacagatttcaggaacataaaaataatgggtgaggcatcaggtcaggaacataatgaatgcctagtttaaacaattgccctccccccagtggggggcatgagagtcaagtgactgaagtcccctactccagtctttctgggcctggtaaatcttgcatactgtgcatagctgactgctgagctgctttccttctctctaacatgaatttcttgaatgcggtttgtaatctggattaagatagaattagcccttataatataacaaggcatgtggttggccagagctaaattttaggtaatgttttaattgactttacggaaataataaaataacactcagactttctctattggaggttagggcaaaaggatggcttattggtaggtagttcctcacttactgcagaagtagaaaaaagtagaaaagtagaatttacttttttttttggtatgcctagggtttgaagaatgaggttaattcttgttatccaaggtttatgtatttaattgtagcttagctggaagttggctaaaacagaaaatatctgatcaataccatgtttggttatagtttgaattttggctggaattacacgtgtaaggctcttgagaactataaaaagccaaatcagatccattgcgaccatggatttgtgccatttagatttactaatatattgttgtgagtcctatctaatttaaggtaaatatgattgtattgaaaataatttaaaggaaattttaaagtttggtggttttcttagctaattttatgatcaagaacaatttaattattgttactacatctgaaatgatatatcagaaatacggagattttagagggcagggactgtgattattttgtttgtaattctcaacaaaagtgacttaaagcagattgtcattatgtactttaatgtttattctaatttcagatgtgtcttacaaaagtggttgatgttgatggctaatgcctattttgcttaataaaacggcatacaagtccaacttacttgaaaagaaatttttaaatgttattttcttacctgtcaccacaaagaagtaatacgtttgctatcctatcaactcagctgaccagtaagccacttgtagttgtgatattgttagcttttttagctttgggtaagctgataaaactagcctgcctctaattcctgtttataaaaatgtgtgatgaagtatcatatttatgtccagcttttccctttatttacatagagaatacttgctcaaaataccctttagtaatcatcccctctactttgaaatagtggagtcttctacaaattgtactttttctttaactgaatccattcaagtttaaataaaaggctacttccatttcctttaactctttctctgaactataaggctgttgactatacttaatttaacttcctactttgtaggacaaactcaagcaaccagtccttgtggactaataattgtaaaaccacaaacctaattcttaaagcaaaggaaatctgctttccaggtattttgcatttcatcctcttccaggtaaattattaaaacaagcaggaactagttaactttgccactgattgctgtgtgattgagttacttatctttttttcagtcattgggagtggaaactctaaaaattaatgaaagttatttagggtactaaaaaattacccaattttagagtgaaaatatcaagggaaaatgttgatgaaaataaatacttttgaggtgaccaaatgtgtatctttatacttcatgcctgactgtaagggaaacattgctttttataatgtaaactactcatcttgggaataatgaagtggtatagctaggagcaaagaactgatgttgataggagtaggggagtccttttcaattttaatactgtgtagagtggggatttaacaatttttctcagcctttttttttccttttttgaatgggccgagagattgaggggtggaactgaatgcagcctttctcatttatgatagtagatactcaggtcccagggctgctatttgcaaagtccaatgcaaaatgagttatgtggtagacctcgttcaaaaattaatagtttcaaggctgcaacagtagagcattaaactgagtgtggggctctccctatgtgactgtgtaagttggacacccatgaagctggtctcctaggcactttgtacagaaagaaagataaaagctgaataaatgaaactttggcttctcagcaattggctttctctaccccattcctgttttacacaagctagcatgtttttgttgttgttgttgttttctaaaaaaaggccctgattctttttcatttgaggccaaaggaaagaaaattatatttgcagtctttttatatgcttggggcttatgaaccttgaaggattagtgacaacagttataattgaatttattactaacacaggaacagaaaaccaatactgaatgttttcacttataagtaggggctaaacaacgagaacacatggacacaaagaagggagcaacagactggggcctaccttaagggtggagggtaggaggagggagataataaaaaaaactacctatcaggtactgtgcttattgcctgggtgatgaaatagtctgtacaccaactcccgtgacaatttacctatataacaaacctgcacgtgtacccctgaagttaaaataaaggtttaaaaaaaagagttgagtttatttttcttacacttgtgtatcctttggcatgtgtgcatcctcttcccacctcaccactgccagcacgacctccagcaccaactttttaatagtgatagaatgatgatttacctgttcgtgtcatgtttattcctactgtagttctgaatgagctcatagctaatattgtccaccaaacttaacacaggccaaccacttagagaagaaattttcttccctctcgtaggggtatactgtgcctcttactttgggtatagataccccagttgtttcactttgtcctagagataccagcaaccaattagaaaagaaatggattaaacaagacttttaagttattgggcaggtgagaatgattacaaataaaaatacttcggtggcgaatgttaatttagttatggtgtgctttatcaaagaagttccagatgtttttatgaaatctcattctcttgggtcatttatatcgtgaaggaaaaagaaaatgaaactcattgaagcaattattgtataaaatgggcagaaaggtggaaagagcaaaagattttaatgtcaaagtcaaaagtaaattcttaatcttctttgtataaaactaaataatggctcagaaaacagacttgaatttttatgtgttgtgttatctatttatttgctttgcaccaatctggtttagtgctttggcatgttgttgtcgtcatggtcattggtcgtcgtattcatagcatagcagtgtggtgttctttttgaggactcatgagtttattgtatttctctttcatatttgtatttgaccaagacaaatatcttactgaaaggtatattctattttttttttttgcatttgaccttacagctcaatttattctccgtatgagtaaaatattctcagtagcaatttagatcttttataaatcaggtaacttgaaagataacagtcttttggttgaaattgatcacttaaacagtttctgcccaccgaatagtaatcttaggaaggtttggatgactggatttgtttctttctatagaagcttatgcttgagaagaaaattaatactttctaaaaataattttttaatatatttaaagtatagaaacaatgttagatttaaaatactttgtaaagagaaaagagtgtgtgggttttttgtttttaagttccttggagttttttggtcactaacaagtgcaaataaaatcctattacaaaaaaaggctttgtgtaacagttatctatttggcagattattcatataaacaactctgttaaagctttggctgtttatcacagatactgatgagctgcattatattaaaactgaatgtgttagtgatctgtatttaatgttctagtggctcctggtacagtccagaacaaaactacttttccctctagatataataaaatctcttaagtgagaatattggtataacagacatgtttctacctcatccttttcatttattgaaattttctgtgtaaatcatccttttatgtagaggatcctatatagatgtcccctttttgtgcagttttaatatgttaaatactcaattttaaacagattttcccaaaggtatgggcagtatcacaggagtgggtttggatattggcattagaaaaactattgtaaaatatgttcatgtttcacctgctcaaaaatataacatttcaggagataataaatctagaattgatgaagatattaaaacactgaggcatttagatttcaatttccaaagttcccagatttttaatattttaactttgtgaataagtttctagggattctcagtgcatgagattctgtaaccttaactttggagccctgggttctagagatgattgatcagtcataagctggcagagttgtcctgctttccaaggttataataccttcaaatactcattgctacaaaaatgatggcattctcatttcaagtttagatctgatcattcataaaacagcctaaacttaagagtttccacagtccataaagcatcaaaagccataaaataattcttttttccctattaaagaaaaagccaaaaatatttctgtattttagaataaacatttccagttccatttttaaaatattaacaacatgtaaatttaaatgcttttgtaactgataaaatgttcttttgcatatttccctaccatcctcctgcccttcttcctcaatttgctttacacccctaacattaacattctgtgaacaaatttttaagggttgttataatgtattctatttgtatcctacagtaatttatttgcattttaaaaggagtttgaatacagtgtggcaattttgacaaccagcaagctcatcaaagtaagattctacctgtaatcttatgatacaccaaatgcctgctctattctgcctaacacagacaaggatccatctttacagatggaaagaatagctgacatctagtagcacttactctttgagttccctgaactctatttctagtgtatgaatcactcataacccacttaaattcagattgctcaccaaagcgattaggaaaaaggtttttcctactgggtacaaagcataaggtatttcactcttgtagttgttgtgaataacctagtttctgtacataagctggctggtcagtgatttatatctaggataatgaagtatgtgtgactgcagcaacatatttaaacaaatgatgcacaatgttgtacaggaatattacctgtattaaataggagtaaaacattttcattcataggctgtctaaatatcaatggttaaattactgagttttgctttatttttactccagaagtatttgttgagttcctactacatgcgaggctcttgactgagataactaataagatccttataagatttttctattccagagtttggttgtttagctttgaattacccattctttaatacctaacttgacttctagtagttctttacttattagactcttcttctaaggataaacagaaaaagactgtgtcctagattttacttttgaataggcaggtgacaggaagctgaaaccagtggcttcaatgagatttaggtttcttgtggttttgaattttctatatgacatttctgttatcattgccatttgactaaggaactatgtttactggttttgtaatagtagcatctattcttttggaatctggactttgaacaattcgtttcacagagtcattgaacagccagttccttctctcttacttagaatttttccagggaatttttcacatggcaggataatggaagaaaagccatttgggtaactcttctgttacatttgtatccctccccccttggatccctacagataaattcttaccttctcttcctgctaattgaccagcagcaccctggattgctatcatccctttgtccaaagaaatggtgtagctgtattcaaagacctataaaatgttatgtgctatctattgctacctataaaaaatacctttttttctttttaaaatcaggttgttttagaataaataaaggaaaagtcaattaatggaaaaatttcaagaacagttcacataaaattttggtctattttaatttttttttttaccttttcaaatcacattttaaaataagcagttggagaaaatgtaaaatgaaaaatatgtaaagaatagttagcattaaacatcagatccaattgtaaacttacgtgagataatatggatttatatttattttctagtaaaataaaacttatatgattgcataattgattattgtatatgcaatacaaattaagttcaaaaatgaaagttgagctttttttgtcctttcaaatgtagggccagcatacaattttaagagctatttattataaaattcatggtgaatcactatgaaaattgatttttccttgagcttttaattacattatccatattcccttacgaagttttccaagtatagaagacctacttaatggagcagtaatcaaatgcaaacttaatttaatgatctcaaataaaaggttctacttttctggaaataagattaaaccagatattaaaattatgtatgattataaaagtaaagattaccattattgtaataattgaccaatttagtactttcaagttatttagttacattttctcagttctagtttggtgtggtaaagcattatttgaaaaggcagtataggaagaatacagatagtattcttcagtacagataataccgctgtacagtacagataatattactgctattacagaatcagcaagttgaatgcatgcttcagggaatagggaaatgaatgcggactttttctaactgatttagatggtctgtctgacctctctagaaaaatatgtgtgtatgtatattttgaaatatataaggaatgttaagtctttctcttcccctttttagccttagattgtaagcaaaagaaatcaaggtcaagatctggaagcaagaagaaaatgctaacattacctcatggtgctgacgaggtttacattctccgatgcaggtatatgcctatattgccaaatctgatcagtttcttcatactttgctttgaaacatattagctatttcatttgggatttttaatttgtggcagagtgcattctcaacaatcaagttataaatgaacttttggagataggcttaaaatcttaattcagctcacaatatccgtacttcaacaactaatgaatcaagttttttacattagccaatagtaatgtaaatctattatactgtgatttattaaagtagcttggccaggtgtggtggctcatgcctgtaattccagcactttgggtggccaagatgggtggatcacttgaggccaggagttcaagagcagcctggccaacatgatgaaacctcgtgtctactaaaaataccaaaattagccaggctttgtagcgggtgcctgtaatcccagctacttgggaggctgaggcaggagaattgcttgagcccaggaggcagaggttgcagtgggccgagatcgtgccactgcactccagcctgagcgacagagcaagactctgtctcagaaaaaagaaaaaaaaactggctttccttgtgtttatttggtttgtatggtttaattttgtttggtttgatgttttgttgtcttgagttctcgcttattgggaacacattttctctcccctcatagtcacgccttcttccgtactcacactcacacacaacacacatgaagaaacatagacacaatgccatttaaggaatgctaaactggggaagggtcttttctaaagaatgacatattttggagtaatagttgttgtttcaagtgaattaagatgtgtagatgttaattttaaaataataatgctcccacctatacaaagattactggagtttattatagctgttaataaacatatgaattgggagttttgatgttttattaaatcatttgactttagaaactttatcaattgctgtctttaaaatatgataaagtttattccttatgttttaggattttgtgtgaattagttttaaagaaagagaattggtcatgttaagagaattgttatctttctgtaggttttgtggcctagtctttcgaggacccttgtctgttcaggaagactggattaagcacttacaacgacatattgtaaacgctaatcttccacggactggagctggcatggtggaagtcacgtcactacttaaaaagcctgcctccattacagaaacttcattttctctactaatggccgaagcagcttcatagaaccaggaaaccttttaaatagccagtttgaattggatgtaaatttgaaattctttttttttaagccacattaaattatctgtttataaatactaaagcaggaaaatggggggaaagtgaattacagtgacatcagagcaaattgaatacttaaaacagtaagtagtctatatattttatatagggtggaagatgtgtttttaaggtttatgaagttttgttggttaactgtgttcactcagtaaaagagcagtacatgtaagcagccattaataaactgttgcacatggatacttatagacagacttattggacaattatgttttttgcagtgttaccagaatcaaggctctgtttattccccacaagacttgcatagaaaaataagatattatattttgtttgtatgtatttagtgttttgtataataccaagaaccgctgactaaatttactcaaattagggcattaaatatcatgtacttcatagtttgagactgttcactcaaatagggcagagtactattctatctagatgtgtaagtgttttttttaaaatcacatggaacggttttttttatactaaaaagtggagggagatttgtttaaacaagtatttctaaaagaaatatgtacatagttctggaaattatttgtggtaaggaaatattctttactccagttgcatttctcagacaataaagtggtgcatccatgctacctcctactttgtcaacaaagatgctatttaccctttacatttttgtatcataatagattttaaaaatctaatgttctttattgcaagacattcttttgttaacaggtttgtttctttttaatgttttacctaaaatttgacatgcttacaggacaggtttgcctcttactttatttaacattgtagaaatgtaattaataaacaatgctcactacacagtttagaatagacgttctcatttatattatcttccaaatttgatcagttagcaaaacttaatacaccaattaaaatatttctacatatgagaatgtttacaatttaaattttagaacttgttttggatgtgattatatgtacgaaaatcgtgtaacactatgctcatgctaagaaccgacataacagaattactgaaataaatgtgctgtgaggaatggaaaatatggtgcaggtgtcttggtcatgataaattgtgattctttttaaaaattttttccaaaaacaattaggtattttaatctgaaatcagattcctttacaaacaacaagtttttgtatgcaagcaccattttatttcatgtagtatggctaatactatagttgaaccaaggatatgcattgattctttgcttcgtatgtaaataaagttaaaaacagttaaaataaggagtattttggtagagtatatacatacctcactgccagtgaaattgctttcctatggtatatctccttaccagaaaaatctctaaataaaaaaaggtttaaagaaaattaaaatgtgaaa

SEQ ID NO: 996 - DNA, 26018 bp, Homo sapiens
tctagactaaatgtgttaaatgggcttgccaacaatatggatgatttgaagataaacaccgatattactggtgctaaagaagaactcctagatgacaacaattttatctcagacaaagagagcggagttcataagccaaaagattgtcaaacatcatttcagaaaaataatacgttgactctgcctgaagaactgtcaaaggacaaatctgaaaacgccttaagtggaggccagtctagtctatttatacatgctggtgctcctactgtttctagtgaaaactttatcttgcctaaaggagctgctgttaatggaccagtttcacactcctccttaactaagacttccaatatgaataaaggcagtgtttcattaaccactggacagcctgtggatcagccaacaacagaatcttgttcaactttgaaggtagcagctgatcttcagctgtctacaccacagaaagcaagtcaacaccaagttttatttttgttatcagatgtagcacatgctaagaatcccacccattccaataaaaaactacctacctctgcttcagttggttgtgacattcagaattcagtagggagtaatataaagtcagatggcactttaataaatcaagtagaggtgggtgaggatggtgaagatttattggtgaaagatgattgtgtcaatacagtaacgggaatttcctcaggtacagatggatttaggtcagaaaatgatacaaactgggatccccaaaaagagttcattcaatttcttatgactaatgaggaaacagtagataaagctccacctcattctaaaataggtctagaaaaaaaaagaaagcgaaaaatggatgtaagcaagataactcgttataccgaggattgctttagtgattctaattgtgtacccaataaatcaaaaatgcaagaagtagactttctagaacaaaatgaagagctacaagcagtagactcacagaaatatgcattatcaaaagtgaagcctgaatcaactgatgaagacttagaatctgtggatgccttccaacatctaatttataacccagataagtgtggagaagagagttcacctgttcatactagcacttttctttcaaataccttaaaaaagaaatgtgaagagagtgattctgagtcacctgctactttcagtaccgaagagccatcattctacccctgtacaaagtgcaatgtgaattttagggagaagaagcacctccacaggcatatgatgtatcatttagatgggaatagtcactttcgccatcttaatgtcccaaggccatatgcttgtagagaatgtggacggacatttcgagatcgcaattcacttctaaaacatatgattattcaccaggagagaagacagaagttgatggaggaaattcgtgaattgaaagaacttcaggatgaaggaagaagtgcacgattacagtgtcctcagtgtgtgtttggtaccaattgccctaaaacatttgtgcaacatgctaaaacccatgaaaaagataaaaggtactactgctgtgaagagtgtaacttcatggcagtgacagaaaatgaattggaatgccatcgaggcattgcacatggggcagtggtaaaatgccctatggtcacttctgatattgcccagagaaaaacacaaaaaaagactttcatgaaagactctgtagtaggatcatccaaaaaatcagctacctacatatgtaagatgtgtccttttactacttcagccaaaagtgttttaaaaaagcacacggagtacttgcattcatcatcatgtgttgattcatttggtagtcctcttggacttgataaaagaaaaaatgacatccttgaagaacctgtagatagtgatagcactaaaacattaactaaacaacagtcaaccacatttccaaagaactctgctttaaaacaagatgtgaagcgaacatttggatcaacctcacaatcaagtagtttttcaaaaattcataagcggccacacagaatacagaaagctcggaaaagcattgcccaatcaggtgtaaacatgtgcaatcaaaacagctctcctcataagaatgttacaattaaaagcagcgttgaccaaaaacctaagtatttccatcaagcagcaaaagaaaagtctaatgccaaggcaaatagccactatttgtatagacacaaatatgaaaactataggatgatcaaaaaatcaggtgaatcatatcctgtgcatttcaaaaaagaagaagctagttcattaaattctttacacctgttttcatcatcaagtaattctcacaacaattttatttcagaccctcataagcctgacgccaaaaggcctgaaagcttcaaagatcacagacgtgtagctgtaaagagagtaattaaggaatctaagaaggaaagttctgttggaggggaagacttggatagctatccagattttttgcataaaatgactgttgtcgttttgcaaaaacttaattctgctgaaaagaaagatagttatgaaacagaagatgaaagttcctgggataatgttgagttaggagactacactacacaggccatagaagatgaaacctatagtgatattaatcaagagcatgtaaatttattccctttatttaagagcaaagtggaaggtcaggagcctggagaaaatgctactcttagttatgaccaaaacgatggcttttattttgaatactatgaagatactggaagtaacaactttttgcatgagatacatgatcctcagcatttagaaactgcagatgcttcattgtcaaagcatagttctgtttttcattggactgatttgtctcttgagaagaaatcgtgtccttactgcccagcaacatttgaaacaggtgttgggttatcaaatcatgtcagggggcatcttcacagagcaggattaagctatgaagcccgtcatgttgtatcaccagaacaaatagccacaagtgacaaaatgcagcatttcaaaagaactggcacaggaacacctgttaaacgagttagaaaaggtaagttctccatggggatgatttgggctgataggtctgtgttctaattctgaagatttaaaagttttttttgaatttagtctttattagaatcataattttatgtttcagaattaactcattttagggtggtcagtttatataagaaagtctgatattactcttaaaaatttttttctagctatagagaagtctgaaaccacttctgaacacacttgtcagctctgtggtggttggtttgatactaaaattggattatcaaatcatgttagaggccacttgaaaagacttggaaagacgaaatgggatgctcacaaatctccaatctgtgttctgaatgagatgatgcaaaatgaagaaaaatatgaaaaaatcttaaaggcattgaacagtcgtcgtattattcccagaccatttgtagctcaaaaacttgcatcaagtgatgactttatatctcaaaatgttatacctcttgaagcataccgtaatggcctaaagactgaagctctgtcagtgtctgcatcagaagaagaagggctgaatttcttaaatgaatatgatgaaacaaaaccagaactgcccagtgggaaaaagaatcagtctcttacactcatagaacttcttaaaaataaaaggatgggagaagaaaggaattctgctatttctcctcaaaagatccataatcagacagcaagaaagagattcgttcagaaatgcgttcttccattaaatgaggatagtccgttgatgtatcagccacaaaaaatggacttgactatgcactcaggtaagaggacgtttatgactatgctatacacagtttaaatgcagttcaattatgccttctttaatggaatctatgtggaaaatactttctcacaatcttcctgtttaagctgctttttttttttacagagcacagattggttattctactgtcatttctgtataactcatcaattgatgctcattagcactgagttctctgtgcctcttttcttggtctgaatgtaaggtgagaacaaaagcagaagaaaaccacacacacacacaataaaaacaacaaacaaaaagctgatctgtaaaaataaaacttgctctggctggaggatggttgtggatgggaggttgatgttcaaaagcatagcattattgaaaaggcatacctctgtcatatttttgccagttctccaaggtgatcatgttttcaagatttagctgttggtttttccactgcttaggtaaaacaaaacagactcttaaagctgaatggattggtgtctgttgtgattaacccaaagaaacatctccctctccaattcctcattgtattgcggaatagtttggttttggagaacagttgtgaacataaaacatatttgtttggggttttaggttttaagatagtgctctaatggaacaggacagatgatttagcttagtgctggtgcaccaatagttttttccttttgaaaggaatattttgtatgtattggcaaataatgtggcagataaagtagccaaactttattcagtattgccaagtgtggtttatacttttagactagaaaaattttaagtgttttttctagatttctttttgaaggttaatgttgaaggtttatgtaaatggtctcatgattagagctctaagttgaatgtgtcagaggtaatagttaatggattaataacgactaacattactgtaaagtaatgttgtttatttgctttggggcagacattgtgatatcccaaatagttgtaatgcagttttgatttaaggaaagataactttgtattgtaagtggtctggaaagcagtttatcttgtatgagcttctgtttaatccggctttttctttcgaataaagagtctctgaaagtcaatagctttcaatattttttcagaagggtaaaacgcagggaagatgtgttagctgtgttgaccaaggggtagtatacttcagagatggaaagcatatttgtggctatcacagtaatgctgaagaaaccagttgaaatgtgttgggggagtgaggattgtctgagaagttaggagtttcttattgtttgaacatgtttttcctgtgatgactaagatgttagcttgttgatcatttatttagcacaaagattttagcaaaaaactttaaatcattaactttcattattgattgcgcattcagagtaatgaacataaaataccctaaataaaatgttgtgtctaacagctgttcagtggtgtgttttaccaccttttctcccagccttcatcagaaagcctaatttagtattgagacttttacggttttgtgggtaaaacactttaattaccactttgtcaactagactttttaattctttttattggtaatgttgtaagctttgaaacttctcaacagaaccgtgttgttcaaatcacaggattgtattgtagtaggtttaagaaataatctgcgtaacacagaaatctgcaagaaagtaataataggtgtatatccagaggagctcaaaggttcaagtcactcctcgtctacctttccaaagagcatgagttgactctaaatactaactacaaactaataacagttaacttaatttcccctccttattttaagttaacctatttcattgaacgttttgaaaaccatctttattgtggtgcttttctacactctttaagctaagaaaatttcactttttgaagtgagaactggattatagttttcttttgaatgataggtatgcctgtgaagcttagaacatgtgtgcattgcaatacgacgtttacaagtgctgttagcctgtccaaccacttacgcgcttatgcacgaaagaagagtgctggacttttgactggtacaggtatgtttgaacagatatcacagcaagtctgtttgatacaatacactttttttttccccaccagactggtgttaattcagatcatatttatagctttctttggtaagctgcatttgagtctgaatacccattgaatttcagcaacttgtaaactgttagatgtaattctaagcaagttaatctttttcttttggctcttattgacttaatttgggggaaaaaaaattaacccaagaggtgtggaactttgagtctaccttaatcccatttattttttagaatactatttttgatttttaaattgattttagattccagtaaaacacctctctttatagttctagtcgggctcagtggtgtgcccctatagtcccagctactcatgaggctggcaggaggatcacttgagctcaagagttagcggctataatgtgctatgattgtgcctgtgaatagtcactgcactccagcctgggcaacatagcataaaaatattgtagttctagcttggggaaatcctttattagaaaaggaaattatagggaaatttcaaaatgtagacttgattaggaaactaagcaaactaatgaattttcattagtctatagattagatctttgaaggggtgagccttaataatggcttgtgttgacaagcgaatagatttttcttttaatacttcttaaatatattaaggattaataaatttagctatgcacataagtgttaacatgcacatttctgtgttatttttggttggttagcccaaccttgcagatacctcttaatactgctcatctgtgaaaattttattagcttacttatatgtaatacgcttcttataacctacaaaatgctttgcactttcatttgtagtcttttaagctaccctgcttcagcaaatctcatttccctcacatcttaaaatataccctctttttgacatagatctacataaattcttttgcctaaaattctttccaatcattttatttctcttgctcttttttagatcactgcctcctgctttcttctagttgttttcccagcttttttgttcttcctcatgtcctagaacttagatccaatatgttcttgctttcaaaaaaccacttatatttatactagtgtctttcttctgcttctttgcattcttccttaacttgatatacaaatgaccagggatgaatgttgacaatttatattaaaaagagaggagtggggtgagttttagtctactggattaggcctcctactctgagattataatttttatataccctcacctttatcaggcttggcaagtgattgcagacattagaggtggggaacaataaaaataagagactatacaagtaggaaatcattattgttaccatacttgctaacttttattgaacatttactatgtgtcaggcactatgctatgcaatttacatgcataacatttaatctttacaacagccatacaagttgtaggtactggaattctcttaacgttttataggaaactaggacttaaagaacttaatttgctcaaacttacacagttaataagtagcaaggttgtaattcaaatcagggctatcttacctaatctttgtttttaatcactattctctaccttacacaggcggtctatttttgaatttcttatttttaaaataagaaattgaaataaaaataagcaatggaaaattctaaaatgaaggtgggtttgtttatttatttatttattttgagacggagtctcgctctgtcacccagattggagtgcagtggcgcgatctcggctcactgcaacctccacctccctggttcaagcaattcccctgcctcagcctcccgagtagctgggattacagactcatgccatcatgcctggcaaatttttttgtatttttagtagagatggggttttaccatgttggacaggctggtctcgaactcctgacctcaggcagtctgcccgccttagcctcccaaagtgctgggattacagccgagagccaccgcacccagcctgaaggtgggtttaaaatggggactattctggtgaagactgaataaataagagtctaattaaaaagagcagagatccaagaagtgcttaggcctaaattagactttagaggagttaatgttccattctgattattcaagcagattatgcaaatatccaataaggcaagatatctccagtccagattttattagtccattaaaaaaatgcttttacttcatctgaaaattctgcaaaacacaggattaattacttataaataactggtagtaaatctccatttaccaagaatgcacttatgaagattatctaaaaaatcttcattatcagagagaaaagtaatgtaggatgactgggaatatgtttaggtcctgaagaataaaagagggtgttattttaaaaatatgattaagtactaccaaaatattagaagtactaggaaatagaaagcgtgtgtttggcagtcctaggcaaagaaaaggaaaatgagaaactgaagaaagcctagggtcttattttccacacccagtagccacttttgagaaactttaaaaactaatgcttctttttcttggaaattctgaaacattttttccctcattaaaaaaaatcttcttgatcagtagagctatacagatgtctttgctgcttattcatgccaactaagaagttttttttcaagctttattaacttttctgttttccagatagagaattctgtattgtatttacaaactccacatactgattatcccccatatcaatatcactgttataaagcagtgttcctaaaaacctatggccctagaaggttccacttggttattataagtgattcattaattcatatgagtaacaggcatcatttttcaagaacacatgatcttttaatgaataaaatgcaaattcatttttataaaatcttaccttagtatatcacaaaattggaacaatgtaaagggaaagtagataggaataaagcctccctaaccatgtccagtatgtgtatttctagtttaagcagtcttaattcatgtagattttaagttgtgtggtccactcttgaatacaaagcttagataccctcagactaaatggtaaaggcctgcttttggttacctgtgatagaataaactttcaagccttcttagaagccacagctcctggtcttttctgtgggaactggtgaccttttgagggaagaaaaatatttcttctaacttataatctcttcaagtatcctgaatacactgaaaaggatatccctcttcttcccaaaatacctgtttactggtaacttaaatacttctaatgtgatggttctcaatctttactggggtcaccgacatctttgagaatttcatgaaagctgtgggccccatcccagaaacatgcacttatttgttctcagataaaaatttttgtgtgtatagactttgcgtatctcctgaaggctatcatcaatttgtctgatggcaaattgagaaaggagagatgccagaataaaaggaaagtagaaacagaactaggaatcagaagccttaagaagttcttttttttttaagagcagaagatgcttaaaatgcaagaattgcataatagcaaaactaattgtggggtcattatcttccctaatatttgtaaaaggaaccgatgggggaaataggaaagatttagaattgaagatttggaagaggtgggcagacttgggagagttaaattgtcataaaagaataatttcacagattaaagttttgcccagaactgtcccagtttatcttctgttgggtaggttcaaataaattgtttaataatttttctgtgtcttcacttgtagataatttatgaagctgttttacttcctttccccgatcaatctttatcaaaatagactagaatcaaagggtttattttatatcctatattgtaaatttaaggcagacttcttattcaagagtttattctagttatttatggaatgcagtaatggtaggggtttttttttttttgagattttgttctctttaatgttttacatgctcatacagatttttttctggttaattttccatacagtttaatgagaacattatatagttttcattaaatattgaaattttataatgtagcttatattaattacttctggactttttattttactgattagctttttttgtgcctaatgttttaattaaatgatgtatttttatgctagccatattaagaacatagttctattaagttattaatggagtgactatacatactggtttaccttgttgtcacacctaagtactagtgcctcttttactctcataagtgtcctggattgaatgataaattaatcatcctggttattaaaattgctaaagcatttaaaattaaggtaaagcatattctatcaacctaatctgcaatcaggaaaaaaaatatattttgaggtcaaaataagagtgaatttcaacaggtagggaaagggaaatacagagtagagagaatgttgttaaaggaagtagatctgtcagatgaatgccacaatgcttttctatggtagatagcatgttgttatcttttgtaaagaagaaacaatgatggtagcagtcagcattttaattgagactttattttatatcttgaccacatgtacaaacttacattaatacaaacacacaattccttgtgtactcacctaaatgtactttaatattttcttttttattatattctttgttgtgaaaaattaatgctggtcatgagccagtaaattgatttgctacccacttaagaagtcactatcatagattgaagacactgccctaactgcctctttctcttaggggttggtactgaccaatggtagtagtatcttagatgtcataactcttctgtggcagcaggtgaattttctatactcattctatccacatttttctctctagatcacttttgtaaatcaaatgctaacctctgggacttaaagtaattggaaatttctagttactcatttaaaattaatgcaagaaaaatatttttatatttgggaggggcttcatttcattatcttcagaacaattttgtgtgtgtgtgtgtgagacggagtttcactctagttgcccaggctggagtgcaatggtgcagtctcggctcactgcaacctctgcctcccaggttcaagtgattctcctggctcagcctcctgagtagctgggattacaggcacacgccatcacgcccggctaattttgtatttttagtagagatggggtttctccatgttggtcaggctggtctcgaactcctgactttaggtgatccacccgcctgggcttcccaaagtgctgggattacaggcgtgagccactgcacccagcccagaacactttcttgatacgttttggaagtaaagcccaattgttgctattctacaacaaatgacttatccatcataattatttgacttttctgatgaggtcaataccactagtgcaatatattaacgtttttaaaaaatcaagtcagtgttttatttttcataccatctacttttaagtgtaatcgtagtaggtttcttttgcctgttttcagctttaatgatataattggccacacaggactgtaacaagtactaatgaacatatagcacagtatcaagtgctgaatgggtttgtaagccactagaaaagtcattcttatgttgtggaaagtgctatgggagcactttctgatgtgatagaaaaaatagtattgtgaaagcttcccaatgtgcattaaattatttgttcattcatgagtgtcactgtagtgtcttttaaaaataatatagtattgcatgtttgaaaaattgcatgttttcatagtggttcattcagactgaaagagtgtaagtagaaaattttgatcttcttattaagattaaactccaaatgagcaaacttgcttctgcttaaagcaaactccttgacaattcttccagactgggctgaggagggtatgtgaaaagtatgagacatgtctctgctgtcagagaaattaggaaaggattgttgacaacatacataaaactatcaaaaattgaaaactatgcaagatagtatacaactaaatggcatattggctttaagtgttgtaggagttcaggttgattattttagtctaagcctccttttgagggcagctgggaattgagattccttttttttctgatgcccttactgtttgtctcattgaattagagcttgtaaaaaacagaaaaaataaataaataaaagtagttcatgctggtatgcttcttgtgactttttaaatgcaagagaacaacaaaaccagcagccatacaaaattttattcattcaacaaaagtttgagttcttgtaccaagactgttcatcgctgagccagtaaagatactgcactccagctgcataaacataatataacccagtgggaaaagatcaagtatgccattacagaagggtttatatggtttcagccagaccctgaagttgaaggatgcagtagagttttaggaagacgagatgaagtgtagaatatttcaggcagagaagaacatagtgtggacacaaagggatgaaatttggacttcaagtgtcaggagtggaacttggagttcaagtgtcagaagatttggttacagatgtttggtaaaattgtagtgccagaaaggtggggttggtgctttgaatgcttggtaaaaaaaattaggaagtcattaaaggatgttttaaaaataaggaggccgggcgtggtggctcacacttgtaatcccattactttgggaggctgaggcaggcacatcacctgaggtcaggagcgtgagaccatcatggtcaacatggtgaaaccctgcctctactaaaaaaaaatacaaagaactagccaggcgtggtggtatgcgcctgtaatcccagctattcaggaggctgaggcaggaggattgcatgaacccagaagctggaggttgcagtgagccgagattgtgccattgcattccagcctgggcaacaagagcaaaactcctcaaaaaaaaaaaaaaaaatcagcccagtgtggtggtgcgcgcctgtaatctgagctactcaggaggctgaggcaggagaattgcttgaacctgggaggtgcaggttgcagtgagccaagattgcgccactgcactccagcctgggcgacagagtgagactccgtctcataaataaatacaaaaggaaaataggccaggtgccgtggctaacacctgtaatcccaagcactttgggaggccgaggcaggcggatcacctgaggtcaggagtttgagaccagcctggccaacatggtgaaactccgtctctactaaaaaatacgaaaaagtagccaggcgtggtggtgggcgcctgtaatcccagctactcaggaggctgaggcaggagaatcgcttaaacctgagaggtggagattgcagtgagctgagatcatgctgttgcactccagcctgggcaacagagcaagactccatctccaaagaaggaaggaaggaaggaaagaaggaagtgaaggagggaggaagagagggagggcagagagagagagaagaaaaataagggaatggtatggttaaacttatattttaaaaagcctttcatgagacagagaaaagatgggtctttatatttcttagctataacttatttctatagtattgttcttcattaagagcatatatgtgtatacatttatctgcacagtaacgtatcatttataagtgattagcaaggtaacgaattatctgagttgagtaaattctctaggtgactgaagaatagtcctttaactgttaataacttgatttttcctaaccattttggtggttattgctccaaaatgttgttcttatttttgccttgagtagcttggatataatttaatcgagtattttgggtaacccttatagatactctactaattgttttattattccagcaagaattaggctatttctccaccatacaaaaaaatgatcggctgattttttcactaattcaacaagcacttttttcacctccaactgtgctaagtatgcagagatacattggatcttacaatacagtagaagcacatatatgcataactgtaatacaagacaaattgttaagtgccattggagaggtatgcgtgaaatactgtggaatttcagagaaagaggaagacactttcagctagactaggaactcccaaggcttttggaattagcatttgaatggaccctgatgtatagctaactgaaatggaaatgggggtcggggtggggaagagaaatgcctgaaagagggagcaaggtggaacaatgtgggaagtttataggaaatactaggaagtaggaggtaagggaattgagttggactggtaaagtgagtcagatagatgacatagaacgctagtctaagatgttggaattaactttgtagtggggaactatttgaatgcagaatttgtgtaatgcttttgaaattgctttttaaataaaggatttggcagagaggaggaaaaattgcagggtagatcattttaagagtcctgtaccaggtcagtgacattaagaatgtaaaggaggggtactagatgtatgggtaatattatggaaataaaataagcaggatatggtagattagagttaagagatgactcaagattttaaatctgagtgggaggaggatggttataccagtacagttaatcaatctgctaccatgctgtctggtagaagggcaggcttcattacttctctgtcatttactagcaacacttcaacatccagctatccactataacaaagtatcaccttaaaagcaggagatctacaaatttggaaaagagagctttatttcttaggaagcttgaagcctgcaggcttggaagtgtatcctcagacagagaccaaaagcaagcccttcaaaggaggaagggtgagacaggaagttatgttgaatgggttggctaagtatacatattcaacagattataggaggagctatgaatattcatgagggggtgcacacaagcttagtgtgcacactccatgttacatacatcccatgttcactttgagttggagacctaacatttaatcatagtaaaattaaggtttacatgtcaaaaggtgaaacagagttcataggcatcctatgtgcagccttcatggaccagctagaaccagttggtgatctcttatcagtaaggaatgctggtcagttcaaaaccacaaaaacagagtggagtctggcttctgagttaggcaattggttgatatcagtggggagcaagtcttttgaaagggttggtttctttttaactcttaggaaggaaagttttatggtggttagtgagggaggggacctaacgagacttgctttacctcctgtcccatcatggctgggaactcaatttttaaggtttctctggggtcaccttggcaaagaggagggtgtccattcagtctgctgtagaacttagaattttatttttatttctcaaaagcaaataaccacacttgttgaatcagtaagtttgtttttaggagaatatagcctaagagttacaccattgtagcataaaatacttaaattttatgatgcttgttttttgctgctcattggtttcataaggaaggtgatctattttgactgacatcttgtttttcatgcaagtcttatctagtttcctagcattactattggtttaattatttactaagtttctgggttttgcttttttttttttaatatatgtttgggaatcttaaatatatctaattatatcttcagttataatgtttgtgtttgctatgatttttattctctaagccttaaataatgagattcagaaaatatcattaggtatagagtttattcaagcccaaagcttgaggatggccacctgggagcataggttcaagttgccctggatatacactgtgattagcagcagttacaagtgaatttttaagaaaaaaagcggtttctatgtttatttaccaagaatttacattaagataacgtaagctatcgattggctatacattgttctttgtatcacagatttcaggaacataaaaataatgggtgaggcatcaggtcaggaacataatgaatgcctagtttaaacaattgccctccccccagtggggggcatgagagtcaagtgactgaagtcccctactccagtctttctgggcctggtaaatcttgcatactgtgcatagctgactgctgagctgctttccttctctctaacatgaatttcttgaatgcggtttgtaatctggattaagatagaattagcccttataatataacaaggcatgtggttggccagagctaaattttaggtaatgttttaattgactttacggaaataataaaataacactcagactttctctattggaggttagggcaaaaggatggcttattggtaggtagttcctcacttactgcagaagtagaaaaaagtagaaaagtagaatttacttttttttttggtatgcctagggtttgaagaatgaggttaattcttgttatccaaggtttatgtatttaattgtagcttagctggaagttggctaaaacagaaaatatctgatcaataccatgtttggttatagtttgaattttggctggaattacacgtgtaaggctcttgagaactataaaaagccaaatcagatccattgcgaccatggatttgtgccatttagatttactaatatattgttgtgagtcctatctaatttaaggtaaatatgattgtattgaaaataatttaaaggaaattttaaagttaggtggttttcttagctaattttatgatcaagaacaatttaattattgttactacatctgaaatgatatatcagaaatacggagattttagagggcagggactgtgattattttgtttgtaattctcaacaaaagtgacttaaagcagattgtcattatgtactttaatgtttattctaatttcagatgtgtcttacaaaagtggttgatgttgatggctaatgcctattttgcttaataaaacggcatacaagtccaacttacttgaaaagaaatttttaaatgttattttcttacctgtcaccacaaagaagtaatacgtttgctatcctatcaactcagctgaccagtaagccacttgtagttgtgatattgttagcttttttagctttgggtaagctgataaaactagcctgcctctaattcctgtttataaaaatgtgtgatgaagtatcatatttatgtccagcttttccctttatttacatagagaatacttgctcaaaataccctttagtaatcatcccctctactttgaaatagtggagtcttctacaaattgtactttttctttaactgaatccattcaagtttaaataaaaggctacttccatttcctttaactctttctctgaactataaggctgttgactatacttaatttaacttcctactttgtaggacaaactcaagcaaccagtccttgtggactaataattgtaaaaccacaaacctaattcttaaagcaaaggaaatctgctttccaggtattttgcatttcatcctcttccaggtaaattattaaaacaagcaggaactagttaactttgccactgattgctgtgtgattgagttacttatctttttttcagtcattgggagtggaaactctaaaaattaatgaaagttatttagggtactaaaaaattacccaattttagagtgaaaatatcaagggaaaatgttgatgaaaataaatacttttgaggtgaccaaatgtgtatctttatacttcatgcctgactgtaagggaaacattgctttttataatgtaaactactcatcttgggaataatgaagtggtatagctaggagcaaagaactgatgttgataggagtaggggagtccttttcaattttaatactgtgtagagtggggatttaacaatttttctcagcctttttttttccttttttgaatgggccgagagattgaggggtggaactgaatgcagcctttctcatttatgatagtagatactcaggtcccagggctgctatttgcaaagtccaatgcaaaatgagttatgtggtagacctcgttcaaaaattaatagttgcaaggctgcaacagtagagcattaaactgagtgtggggctctccctatgtgactgtgtaagttggacacccatgaagctggtctcctaggcactttgtacagaaagaaagataaaagctgaataaatgaaactttggcttctcagcaattggctttctctaccccattcctgttttacacaagctagcatgtttttgttgttgttgttgttttctaaaaaaaggccctgattctttttcatttgaggccaaaggaaagaaaattatatttgcagtctttttatatgcttggggcttatgaaccttgaaggattagtgacaacagttataattgaatttattactaacacaggaacagaaaaccaatactgaatgttttcacttataagtaggggctaaacaacgagaacacatggacacaaagaagggagcaacagactggggcctaccttaagggtggagggtaggaggagggagataataaaaaaaactacctatcaggtactgtgcttattgcctgggtgatgaaatagtctgtacaccaactcccgtgacaatttacctatataacaaacctgcacgtgtacccctgaagttaaaataaaggtttaaaaaaaagagttgagtttatttttcttacacttgtgtatcctttggcatgtgtgcatcctcttcccacctcaccactgccagcacgacctccagcaccaactttttaatagtgatagaatgatgatttacctgttcgtgtcatgtttattcctactgtagttctgaatgagctcatagctaatattgtccaccaaacttaacacaggccaaccacttagagaagaaattttcttccctctcgtaggggtatactgtgcctcttactttgggtatagataccccagttgtttcactttgtcctagagataccagcaaccaattagaaaagaaatggattaaacaagacttttaagttattgggcaggtgagaatgattacaaataaaaatacttcggtggcgaatgttaatttagttatggtgtgctttatcaaagaagttccagatgtttttatgaaatctcattctcttgggtcatttatatcgtgaaggaaaaagaaaatgaaactcattgaagcaattattgtataaaatgggcagaaaggtggaaagagcaaaagattttaatgtcaaagtcaaaagtaaattcttaatcttctttgtataaaactaaataatggctcagaaaacagacttgaatttttatgtgttgtgttatctatttatttgctttgcaccaatctggtttagtgctttggcatgttgttgtcgtcatggtcattggtcgtcgtattcatagcatagcagtgtggtgttctttttgaggactcatgagtttattgtatttctctttcatatttgtatttgaccaagacaaatatcttactgaaaggtatattctattttttttttttgcatttgaccttacagctcaatttattctccgtatgagtaaaatattctcagtagcaatttagatcttttataaatcaggtaacttgaaagataacagtcttttggttgaaattgatcacttaaacagtttctgcccaccgaatagtaatcttaggaaggtttggatgactggatttgtttctttctatagaagcttatgcttgagaagaaaattaatactttctaaaaataattttttaatatatttaaagtatagaaacaatgttagatttaaaatactttgtaaagagaaaagagtgtgtgggttttttgtttttaagttccttggagttttttggtcactaacaagtgcaaataaaatcctattacaaaaaaaggctttgtgtaacagttatctatttggcagattattcatataaacaactctgttaaagctttggctgtttatcacagatactgatgagctgcattatattaaaactgaatgtgttagtgatctgtatttaatgttctagtggctcctggtacagtccagaacaaaactacttttccctctagatataataaaatctcttaagtgagaatattggtataacagacatgtttctacctcatccttttcatttattgaaattttctgtgtaaatcatccttttatgtagaggatcctatatagatgtcccctttttgtgcagttttaatatgttaaatactcaattttaaacagattttcccaaaggtatgggcagtatcacaggagtgggtttggatattggcattagaaaaactattgtaaaatatgttcatgtttcacctgctcaaaaatataacatttcaggagataataaatctagaattgatgaagatattaaaacactgaggcatttagatttcaatttccaaagttcccagatttttaatattttaactttgtgaataagtttctagggattctcagtgcatgagattctgtaaccttaactttggagccctgggttctagagatgattgatcagtcataagctggcagagttgtcctgctttccaaggttataataccttcaaatactcattgctacaaaaatgatggcattctcatttcaagtttagatctgatcattcataaaacagcctaaacttaagagtttccacagtccataaagcatcaaaagccataaaataattcttttttccctattaaagaaaaagccaaaaatatttctgtattttagaataaacatttccagttccatttttaaaatattaacaacatgtaaatttaaatgcttttgtaactgataaaatgttcttttgcatatttccctaccatcctcctgcccttcttcctcaatttgctttacacccctaacattaacattctgtgaacaaatttttaagggttgttataatgtattctatttgtatcctacagtaatttatttgcattttaaaaggagtttgaatacagtgtggcaattttgacaaccagcaagctcatcaaagtaagattctacctgtaatcttatgatacaccaaatgcctgctctattctgcctaacacagacaaggatccatctttacagatggaaagaatagctgacatctagtagcacttactctttgagttccctgaactctatttctagtgtatgaatcactcataacccacttaaattcagattgctcaccaaagcgattaggaaaaaggtttttcctactgggtacaaagcataaggtatttcactcttgtagttgttgtgaataacctagtttctgtacataagctggctggtcagtgatttatatctaggataatgaagtatgtgtgactgcagcaacatatttaaacaaatgatgcacaatgttgtacaggaatattacctgtattaaataggagtaaaacattttcattcataggctgtctaaatatcaatggttaaattactgagttttgctttatttttactccagaagtatttgttgagttcctactacatgcgaggctcttgactgagataactaataagatccttataagatttttctattccagagtttggttgtttagctttgaattacccattctttaatacctaacttgacttctagtagttctttacttattagactcttcttctaaggataaacagaaaaagactgtgtcctagattttacttttgaataggcaggtgacaggaagctgaaaccagtggcttcaatgagatttaggtttcttgtggttttgaattttctatatgacatttctgttatcattgccatttgactaaggaactatgtttactggttttgtaatagtagcatctattcttttggaatctggactttgaacaattcgtttcacagagtcattgaacagccagttccttctctcttacttagaatttttccagggaatttttcacatggcaggataatggaagaaaagccatttgggtaactcttctgttacatttgtatccctccccccttggatccctacagataaattcttaccttctcttcctgctaattgaccagcagcaccctggattgctatcatccctttgtccaaagaaatggtgtagctgtattcaaagacctataaaatgttatgtgctatctattgctacctataaaaaatacctttttttctttttaaaatcaggttgttttagaataaataaaggaaaagtcaattaatggaaaaatttcaagaacagttcacataaaattttggtctattttaatttttttttttaccttttcaaatcacattttaaaataagcagttggagaaaatgtaaaatgaaaaatatgtaaagaatagttagcattaaacatcagatccaattgtaaacttacgtgagataatatggatttatatttattttctagtaaaataaaacttatatgattgcataattgattattgtatatgcaatacaaattaagttcaaaaatgaaagttgagctttttttgtcctttcaaatgtagggccagcatacaattttaagagctatttattataaaattcatggtgaatcactatgaaaattgatttttccttgagcttttaattacattatccatattcccttacgaagttttccaagtatagaagacctacttaatggagcagtaatcaaatgcaaacttaatttaatgatctcaaataaaaggttctacttttctggaaataagattaaaccagatattaaaattatgtatgattataaaagtaaagattaccattattgtaataattgaccaatttagtactttcaagttatttagttacattttctcagttctagtttggtgtggtaaagcattatttgaaaaggcagtataggaagaatacagatagtattcttcagtacagataataccgctgtacagtacagataatattactgctattacagaatcagcaagttgaatgcatgcttcagggaatagggacatgaatgcggactttttctaactgacttagatggtctgtctgacctctctagaaaaatatgtgtgtatgtatattttgaaatatataaggaatgttaagtctttctcttcccctttttagccttagattgtaagcaaaagaaatcaaggtcaagatctggaagcaagaagaaaatgctaacattacctcatggtgctgacgaggtttacattctccgatgcaggtatatgcctatattgccaaatctgatcagtttcttcatactttgctttgaaacatattagctatttcatttgggatttttaatttgtggcagagtgcattctcaacaatcaagttataaatgaacttttggagataggcttaaaatcttaattcagctcacaatatccgtacttcaacaactaatgaatcaagttttttacattagccaatagtaatgtaaatctattatactgtgatttattaaagtagcttggccaggtgtggtggctcatgcctgtaattccagcactttgggtggccaagatgggtggatcacttgaggccaggagttcaagagcagcctggccaacatgatgaaacctcgtgtctactaaaaataccaaaattagccaggctttgtagcgggtgcctgtaatcccagctacttgggaggctgaggcaggagaattgcttgagcccaggaggcagaggttgcagtgggccgagatcgtgccactgcactccagcctgagcgacagagcaagactctgtctcagaaaaaagaaaaaaaaactggctttccttgtgtttatttggtttgtatggtttaattttgtttggtttgatgttttgttgtcttgagttctcgcttattgggaacacattttctctcccctcatagtcacgccttcttccgtactcacactcacacacaacacacatgaagaaacatagacacaatgccatttaaggaatgctaaactggggaagggtcttttctaaagaatgacatattttggagtaatagttgttgtttcaagtgaattaagatgtgtagatgttaattttaaaataataatgctcccacctatacaaagattactggagtttattatagctgttaataaacatatgaattgggagttttgatgttttattaaatcatttgactttagaaactttatcaattgctgtctttaaaatatgataaagtttattccttatgttttaggattttgtgtgaattagttttaaagaaagagaattggtcatgttaagagaattgttatctttctgtaggttttgtggcctagtctttcgaggacccttgtctgttcaggaagactggattaagcacttacaacgacatattgtaaacgctaatcttccacggactggagctggcatggtggaagtcacgtcactacttaaaaagcctgcctccattacagaaacttcattttctctactaatggccgaagcagcttcatagaaccaggaaaccttttaaatagccagtttgaattggatgtaaatttgaaattctttttttttaagccacattaaattatctgtttataaatactaaagcaggaaaatggggggaaagtgaattacagtgacatcagagcaaattgaatacttaaaacagtaagtagtctatatattttatatagggtggaagatgtgtttttaaggtttatgaagttttgttggttaactgtgttcactcagtaaaagagcagtacatgtaagcagccattaataaactgttgcacatggatacttatagacagacttattggacaattatgttttttgcagtgttaccagaatcaaggctctgtttattccccacaagacttgcatagaaaaataagatattatattttgtttgtatgtatttagtgttttgtataataccaagaaccgctgactaaatttactcaaattagggcattaaatatcatgtacttcatagtttgagactgttcactcaaatagggcagagtactattctatctagatgtgtaagtgttttttttaaaatcacatggaacggttttttttatactaaaaagtggagggagatttgtttaaacaagtatttctaaaagaaatatgtacatagttctggaaattatttgtggtaaggaaatattctttactccagttgcatttctcagacaataaagtggtgcatccatgctacctcctactttgtcaacaaagatgctatttaccctttacatttttgtatcataatagattttaaaaatctaatgttctttattgcaagacattcttttgttaacaggtttgtttctttttaatgttttacctaaaatttgacatgcttacaggacaggtttgcctcttactttatttaacattgtagaaatgtaattaataaacaatgctcactacacagtttagaatagacgttctcatttatattatcttccaaatttgatcagttagcaaaacttaatacaccaattaaaatatttctacatatgagaatgtttacaatttaaattttagaacttgttttggatgtgattatatgtacgaaaatcgtgtaacactatgctcatgctaagaaccgacataacagaattactgaaataaatgtgctgtgaggaatggaaaatatggtgcaggtgtcttggtcatgataaattgtgattctttttaaaaattttttccaaaaacaattaggtattttaatctgaaatcagattcctttacaaacaacaagtttttgtatgcaagcaccattttatttcatgtagtatggctaatactatagttgaaccaaggatatgcattgattctttgcttcgtatgtaaataaagttaaaaacagttaaaataaggagtattttggtagagtatatacatacctcactgccagtgaaattgctttcctatggtatatctccttaccagaaaaatctctaaataaaaaaaggtttaaagaaaattaaaatgtgaaa

SEQ ID NO: 997 - DNA, 26006 bp, Homo sapiens
tgtgttaaatgggcttgccaacaatatggatgatttgaagataaacaccgatattactggtgctaaagaagaactcctagatgacaacaattttatctcagacaaagagagcggagttcataagccaaaagattgtcaaacatcatttcagaaaaataatacgttgactctgcctgaagaactgtcaaaggacaaatctgaaaacgccttaagtggaggccagtctagtctatttatacatgctggtgctcctactgtttctagtgaaaactttatcttgcctaaaggagctgctgttaatggaccagtttcacactcctccttaactaagacttccaatatgaataaaggcagtgtttcattaaccactggacagcctgtggatcagccaacaacagaatcttgttcaactttgaaggtagcagctgatcttcagctgtctacaccacagaaagcaagtcaacaccaagttttatttttgttatcagatgtagcacatgctaagaatcccacccattccaataaaaaactacctacctctgcttcagttggttgtgacattcagaattcagtagggagtaatataaagtcagatggcactttaataaatcaagtagaggtgggtgaggatggtgaagatttattggtgaaagatgattgtgtcaatacagtaacgggaatttcctcaggtacagatggatttaggtcagaaaatgatacaaactgggatccccaaaaagagttcattcaatttcttatgactaatgaggaaacagtagataaagctccacctcattctaaaataggtctagaaaaaaaaagaaagcgaaaaatggatgtaagcaagataactcgttataccgaggattgctttagtgattctaattgtgtacccaataaatcaaaaatgcaagaagtagactttctagaacaaaatgaagagctacaagcagtagactcacagaaatatgcattatcaaaagtgaagcctgaatcaactgatgaagacttagaatctgtggatgccttccaacatctaatttataacccagataagtgtggagaagagagttcacctgttcatactagcacttttctttcaaataccttaaaaaagaaatgtgaagagagtgattctgagtcacctgctactttcagtaccgaagagccatcattctacccctgtacaaagtgcaatgtgaattttagggagaagaagcacctccacaggcatatgatgtatcatttagatgggaatagtcactttcgccatcttaatgtcccaaggccatatgcttgtagagaatgtggacggacatttcgagatcgcaattcacttctaaaacatatgattattcaccaggagagaagacagaagttgatggaggaaattcgtgaattgaaagaacttcaggatgaaggaagaagtgcacgattacagtgtcctcagtgtgtgtttggtaccaattgccctaaaacatttgtgcaacatgctaaaacccatgaaaaagataaaaggtactactgctgtgaagagtgtaacttcatggcagtgacagaaaatgaattggaatgccatcgaggcattgcacatggggcagtggtaaaatgccctatggtcacttctgatattgcccagagaaaaacacaaaaaaagactttcatgaaagactctgtagtaggatcatccaaaaaatcagctacctacatatgtaagatgtgtccttttactacttcagccaaaagtgttttaaaaaagcacacggagtacttgcattcatcatcatgtgttgattcatttggtagtcctcttggacttgataaaagaaaaaatgacatccttgaagaacctgtagatagtgatagcactaaaacattaactaaacaacagtcaaccacatttccaaagaactctgctttaaaacaagatgtgaagcgaacatttggatcaacctcacaatcaagtagtttttcaaaaattcataagcggccacacagaatacagaaagctcggaaaagcattgcccaatcaggtgtaaacatgtgcaatcaaaacagctctcctcataagaatgttacaattaaaagcagcgttgaccaaaaacctaagtatttccatcaagcagcaaaagaaaagtctaatgccaaggcaaatagccactatttgtatagacacaaatatgaaaactataggatgatcaaaaaatcaggtgaatcatatcctgtgcatttcaaaaaagaagaagctagttcattaaattctttacacctgttttcatcatcaagtaattctcacaacaattttatttcagaccctcataagcctgacgccaaaaggcctgaaagcttcaaagatcacagacgtgtagctgtaaagagagtaattaaggaatctaagaaggaaagttctgttggaggggaagacttggatagctatccagattttttgcataaaatgactgttgtcgttttgcaaaaacttaattctgctgaaaagaaagatagttatgaaacagaagatgaaagttcctgggataatgttgagttaggagactacactacacaggccatagaagatgaaacctatagtgatattaatcaagagcatgtaaatttattccctttatttaagagcaaagtggaaggtcaggagcctggagaaaatgctactcttagttatgaccaaaacgatggcttttattttgaatactatgaagatactggaagtaacaactttttgcatgagatacatgatcctcagcatttagaaactgcagatgcttcattgtcaaagcatagttctgtttttcattggactgatttgtctcttgagaagaaatcgtgtccttactgcccagcaacatttgaaacaggtgttgggttatcaaatcatgtcagggggcatcttcacagagcaggattaagctatgaagcccgtcatgttgtatcaccagaacaaatagccacaagtgacaaaatgcagcatttcaaaagaactggcacaggaacacctgttaaacgagttagaaaaggtaagttctccatggggatgatttgggctgataggtctgtgttctaattctgaagatttaaaagttttttttgaatttagtctttattagaatcataattttatgtttcagaattaactcattttagggtggtcagtttatataagaaagtctgatattactcttaaaaatttttttctagctatagagaagtctgaaaccacttctgaacacacttgtcagctctgtggtggttggtttgatactaaaattggattatcaaatcatgttagaggccacttgaaaagacttggaaagacgaaatgggatgctcacaaatctccaatctgtgttctgaatgagatgatgcaaaatgaagaaaaatatgaaaaaatcttaaaggcattgaacagtcgtcgtattattcccagaccatttgtagctcaaaaacttgcatcaagtgatgactttatatctcaaaatgttatacctcttgaagcataccgtaatggcctaaagactgaagctctgtcagtgtctgcatcagaagaagaagggctgaatttcttaaatgaatatgatgaaacaaaaccagaactgcccagtgggaaaaagaatcagtctcttacactcatagaacttcttaaaaataaaaggatgggagaagaaaggaattctgctatttctcctcaaaagatccataatcagacagcaagaaagagattcgttcagaaatgcgttcttccattaaatgaggatagtccgttgatgtatcagccacaaaaaatggacttgactatgcactcaggtaagaggacgtttatgactatgctatacacagtttaaatgcagttcaattatgccttctttaatggaatctatgtggaaaatactttctcacaatcttcctgtttaagctgctttttttttttacagagcacagattggttattctactgtcatttctgtataactcatcaattgatgctcattagcactgagttctctgtgcctcttttcttggtctgaatgtaaggtgagaacaaaagcagaagaaaaccacacacacacacaataaaaacaacaaacaaaaagctgatctgtaaaaataaaacttgctctggctggaggatggttgtggatgggaggttgatgttcaaaagcatagcattattgaaaaggcatacctctgtcatatttttgccagttctccaaggtgatcatgttttcaagatttagctgttggtttttccactgcttaggtaaaacaaaacagactcttaaagctgaatggattggtgtctgttgtgattaacccaaagaaacatctccctctccaattcctcattgtattgcggaatagtttggttttggagaacagttgtgaacataaaacatatttgtttggggttttaggttttaagatagtgctctaatggaacaggacagatgatttagcttagtgctggtgcaccaatagtttttccttttgaaaggaatattttgtatgtattggcaaataatgtggcagataaagtagccaaactttattcagtattgccaagtgtggtttatacttttagactagaaaaattttaagtgttttttctagatttctttttgaaggttaatgttgaaggtttatgtaaatggtctcatgattagagctctaagttgaatgtgtcagaggtaatagttaatggattaataacgactaacattactgtaaagtaatgttgtttatttgctttggggcagacattgtgatatcccaaatagttgtaatgcagttttgatttaaggaaagataactttgtattgtaagtggtctggaaagcagtttatcttgtatgagcttctgtttaatccggctttttctttcgaataaagagtctctgaaagtcaatagctttcaatattttttcagaagggtaaaacgcagggaagatgtgttagctgtgttgaccaaggggtagtatacttcagagatggaaagcatatttgtggctatcacagtaatgctgaagaaaccagttgaaatgtgttgggggagtgaggattgtctgagaagttaggagtttcttattgtttgaacatgtttttcctgtgatgactaagatgttagcttgttgatcatttatttagcacaaagattttagcaaaaaactttaaatcattaactttcattattgattgcgcattcagagtaatgaacataaaataccctaaataaaatgttgtgtctaacagctgttcagtggtgtgttttaccaccttttctcccagccttcatcagaaagcctaatttagtattgagacttttacggttttgtgggtaaaacactttaattaccactttgtcaactagactttttaattctttttattggtaatgttgtaagctttgaaacttctcaacagaaccgtggtgttcaaatcacaggattgtattgtagtaggtttaagaaataatctgcgtaacacagaaatctgcaagaaagtaataataggtgtatatccagaggagctcaaaggttcaagtcactcctcgtctacctttccaaagagcatgagttgactctaaatactaactacaaactaataacagttaacttaatttcccctccttattttaagttaacctatttcattgaacgttttgaaaaccatctttattgtggtgcttttctacactctttaagctaagaaaatttcactttttgaagtgagaactggattatagttttcttttgaatgataggtatgcctgtgaagcttagaacatgtgtgcattgcaatacgacgtttacaagtgctgttagcctgtccaaccacttacgcgcttatgcacgaaagaagagtgctggacttttgactggtacaggtatgtttgaacagatatcacagcaagtctgtttgatacaatacactttttttttccccaccagactggtgttaattcagatcatatttatagctttctttggtaagctgcatttgagtctgaatacccattgaatttcagcaacttgtaaactgttagatgtaattctaagcaagttaatctttttcttttggctcttattgacttaatttgggggaaaaaaaattaacccaagaggtgtggaactttgagtctaccttaatcccatttcttttttagaatactatttttgatttttaaattgattttagattccagtaaaacacctctctttatagttctagtcaggctcagtggtgtgcccctatagtcccagctactcatgaggctggcaggaggatcacttgagctcaagagttagcggctataatgtgctatgattgtgcctgtgaatagtcactgcactccagcctgggcaacatagcataaaaatattgtagttctagcttggggaaatcctttattagaaaaggaaattatagggaaatttcaaaatgtagacttgattaggaaactaagcaaactaatgaattttcattagtctatagattagatctttgaaggggtgagccttaataatggcttgtgttgacaagcgaatagatttttcttttaatacttcttaaatatattaaggattaataaatttagctatgcacataagtgttaacatgcacatttctgtgttatttttggttggttagcccaaccttgcagatacctcttaatactgctcatctgtgaaaattttattagcttacttatatgtaatacgcttcttataacctacaaaatgctttgcactttcatttgtagtcttttaagctaccctgcttcagcaaatctcatttccctcacatcttaaaatataccctctttttgacatagatctacataaattcttttgcctaaaattctttccaatcattttatttctcttgctcttttttagatcactgcctcctgctttcttctagttgttttcccagcttttttgttcttcctcatgtcctagaacttagatccaatatgttcttgctttcaaaaaaccacttatatttatactagtgtctttcttctgcttctttgcattcttccttaacttgatatacaaatgaccagggatgaatgttgacaatttatattaaaaagagaggagtggggtgagttttagtctactggattaggcctcctactctgagattataatttttatataccctcacctttatcaggcttggcaagtgattgcagacattagaggtggggaacaataaaaataagagactatacaagtaggaaatcattattgttaccatacttgctaacttttattgaacatttactatgtgtcaggcactatgctatgcaatttacatgcataacatttaatctttacaacagccatacaagttgtaggtactggaattctcttaacgttttataggaaactaggacttaaagaacttaatttgctcaaacttacacagttaataagtagcaaggttgtaattcaaatcagggctatcttacctaatctttgtttttaatcactattctctaccttacacaggcggtctatttttgaatttcttatttttaaaataagaaattgaaataaaaataagcaatggaaaattcgaaaatgaaggtgggtttgtttatttatttatttattttgagacggagtctcgctctgtcacccagattggagtgcagtggcgcgatctcggctcactgcaacctccacctccctggttcaagcaattcccctgcctcagcctcccgagtagctgggattacagactcacgccatcatgcctggcaaatttttttgtatttttagtagagatggggttttaccatgttggacaggctggtctcgaactcctgacctcaggcagtctgcccgccttagcctcccaaagtgctgggattacagccgtgagccaccgcacccagcctgaaggtgggtttaaaatggggactattctggtgaagactgaataaataagagtctaattaaaaagagcagagatccaagaagtgcttaggcctaaattagactttagaggagttaatgttccattctgattattcaagcagattatgcaaatatccaataaggcaagatatctccagtccagattttattagtccattaaaaaaatgcttttacttcatctgaaaattctgcaaaacacaggattaattacttataaataactggtagtaaatctccatttaccaagaatgcacttatgaagattatctaaaaaatcttcattatcagagagaaaagtaatgtaggatgactgggaatatgtttaggtcctgaagaataaaagagggtgttattttaaaaatatgattaagtactaccaaaatattagaagtactaggaaatagaaagcgtgtgtttggcagtcctaggcaaagaaaaggaaaatgagaaactgaagaaagcctagggtcttattttccacacccagtagccacttttgagaaactttaaaaactaatgcttctttttcttggaaattctgaaacattttttccctcattaaaaaaaatcttcttgatcagtagagctatacagatgtctttgctgcttattcatgccaactaagaagttttttttcaagctttattaacttttctgttttccagatagagaattctgtattgtatttacaaactccacatactgattatcccccatatcaatatcactgttataaagcagtgttcctaaaaacctatggccctagaaggttccacttggttattataagtgattcattaattcatatgagtaacaggcatcatttttcaagaacacatgatcttttaatgaataaaatgcaaattcatttttataaaatcttaccttagtatatcacaaaattggaacaatgtaaagggaaagtagataggaataaagcctccctaaccatgtccagtatgtgtatttctagtttaagcagtcttaattcatgtagattttaagttgtgtggtccactcttgaatacaaagcttagataccctcagactaaatggtaaaggcctgcttttggttacctgtgatagaataaactttcaagccttcttagaagccacagctcctggtcttttctgtgggaactggtgaccttttgagggaagaaaaatatttcttctaacttataatctcttcaagtatcctgaatacactgaaaaggatatccctcttcttcccaaaatacctgtttactggtaacttaaatacttctaatgtgatggttctcaatctttactggggtcaccgacatctttgagaatttcatgaaagctgtgggccccatcccagaaacatgcacttatttgttctcagataaaaatttttgtgtgtatagactttgcgtatctcctgaaggctatcatcaatttgtctgatggcaaattgagaaaggagagatgccagaataaaaggaaagtagaaacagaactaggaatcagaagccttaagaagttcttttttttttaagagcagaagatgcttaaaatgcaagaattgcataatagcaaaactaattgtggggtcattatcttccctaatatttgtaaaaggaaccgatgggggaaataggaaagatttagaattgaagatttggaagaggtgggcagacttgggagagttaaattgtcataaaagaataatttcacagattaaagttttgcccagaactgtcccagtttatcttctgttgggtaggttcaaataaattgtttaataatttttctgtgtcttcacttgtagataatttatgaagctgttttacttcctttccccgatcaatctttatcaaaatagactagaatcaaagggtttattttatatcctatattgtaaatttaaggcagacttcttattcaagagtttattctagttatttatggaatgcagtaatggtaggggttttttttttttgagattttgttctctttaatgttttacatgctcatacagatttttttctggttaattttccatacagtttaatgagaacattatatagttttcattaaatattgaaattttataatgtagcttatattaattacttctggactttttattttactgattagctttttttgtgcctaatgttttaattaaatgatgtatttttatgctagccatattaagaacatagttctattaagttattaatggagtgactatacatactggtttaccttgttgtcacacctaagtactagtgcctcttttactctcataagtgtcctggattgaatgataaattaatcatcctggttattaaaattgctaaagcatttaaaattaaggtaaagcatattctatcaacctaatctgcaatcaggaaaaaaaatatattttgaggtcaaaataagagtgaatttcaacaggtagggaaagggaaatacagagtagagagaatgttgttaaaggaagtagatctgtcagatgaatgccacaatgcttttctatggtagatagcatgttgttatcttttgtaaagaagaaacaatgatggtagcagtcagcattttaattgagactttattttatatcttgaccacatgtacaaacttacattaatacaaacacacaattccttgtgtactcacctaaatgtactttaatattttcttttttattatattctttgttgtgaaaaattaatgctggtcatgagccagtaaattgatttgctacccacttaagaagtcactatcatagattgaagacactgccctaactgcctctttctcttaggggttggtactgaccaatggtagtagtatcttagatgtcataactcttctgtggcagcaggtgaattttctatactcattctatccacatttttctctctagatcacttttgtaaatcaaatgctaacctctgggacttaaagtaattggaaatttctagttactcatttaaaattaatgcaagaaaaatatttttatatttgggaggggcttcatttcattatcttcagaacaattttgtgtgtgtgtgtgtgagacggagtttcactctagttgcccaggctggagtgcaatggtgcagtctcggctcactgcaacctctgcctcccaggttcaagtgattctcctggctcagcctcctgagtagctgggattacaggcacacgccatcacgcccggctaattttgtatttttagtagagatggggtttctccatgttggtcaggctggtctcgaactcctgactttaggtgatccacccgcctgggcttcccaaagtgctgggattacaggcgtgagccactgcacccagcccagaacactttcttgatacgttttggaagtaaagcccaattgttgctattctacaacaaatgacttatccatcataattatttgacttttctgatgaggtcaataccactagtgcaatatattaacgtttttaaaaaatcaagtcagtgttttatttttcataccatctacttttaagtgtaatcgtagtaggtttcttttgcctgttttcagctttaatgatataattggccacacaggactgtaacaagtactaatgaacatatagcacagtatcaagtgctgaatgggtttgtaagccactagaaaagtcattcttatgttgtggaaagtgctatgggagcactttctgatgtgatagaaaaaatagtattgtgaaagcttcccaatgtgcattaaattatttgttcattcatgagtgtcactgtagtgtcttttaaaaataatatagtattgcatgtttgaaaaattgcatgttttcatagtggttcattcagactgaaagagtgtaagtagaaaattttgatcttcttattaagattaaactccaaatgagcaaacttgcttctgcttaaagcaaactccttgacaattcttccagactgggctgaggagggtatgtgaaaagtatgagacatgtctctgctgtcagagaaattaggaaaggattgttgacaacatacataaaactatcaaaaattgaaaactatgcaagatagtatacaactaaatggcatattggctttaagtgttgtaggagttcaggttgattattttagtctaagcctccttttgagggcagctgggaattgagattccttttttttctgatgcccttactgtttgtctcattgaattagagcttgtaaaaaacagaaaaaataaataaataaaagtagttcatgctggtatgcttcttgtgactttttaaatgcaagagaacaacaaaaccagcagccatacaaaattttattcattcaacaaaagtttgagttcttgtaccaagactgttcatcgctgagccagtaaagatactgcactccagctgcataaacataatataacccagtgggaaaagatcaagtatgccattacagaagggtttatatggtttcagccagaccctgaagttgaaggatgcagtagagttttaggaagacgagatgaagtgtagaatatttcaggcagagaagaacatagtgtggacacaaagggatgaaatttggacttcaagtgtcaggagtggaacttggagttcaagtgtcagaagatttggttacagatgtttggtaaaattgtagtgccagaaaggtggggttggtgctttgaatgcttggtaaaaaaaattaggaagtcattaaaggatgttttaaaaataaggaggccgggcgtggtggctcacacttgtaatcccattactttgggaggctgaggcaggcacatcacctgaggtcaggagcgtgagaccatcatggtcaacatggtgaaaccctgcctctactaaaaaaaaatacaaagaactagccaggcgtggtggtatgcgcctgtaatcccagctattcaggaggctgaggcaggaggattgcatgaacccagaagctggaggttgcagtgagccgagattgtgccattgcactccagcctgggcaacaagagcaaaactcctcaaaaaaaaaaaaaaaatcagcccagtgtggtggtgcgcgcctgtaatctgagctactcaggaggctgaggcaggagaattgcttgaacctgggatgtgcaggttgcagtgagccaagattgcgccactgcactccagcctgggcgacagagtgagactccgtctcataaataaatacaaaaggaaaataggccaggtgccgtggctaacacctgtaatcccaagcactttgggaggccgaggcaggcggatcacctgaggtcaggagtttgagaccagcctggccaacatggtgaaactccgtctctactaaaaaatacgaaaaagtagccaggcgtggtggtgggcgcctgtaatcccagctactcaggaggctgaggcaggagaatcgcttaaacctgagaggtggagattgcagtgagctgagatcatgctgttgcactccagcctgggcaacagagcaagactccatctccaaagaaggaaggaaggaaggaaagaaggaagtgaaggagggaggaagagagggagggcagagagagagagaagaaaaataagggaatggtatggttaaacttatattttaaaaagcctttcatgagacagagaaaagatgggtctttatatttcttagctataacttatttctatagtattgttcttcattaagagcatatatgtgtatacatttatctgcacagtaacgtatcatttataagtgattagcaaggtaacgaattatctgagttgagtaaattctctaggtgactgaagaatagtcctttaactgttaataacttgatttttcctaaccattttggtggttattgctccaaaatgttgttcttatttttgccttgagtagcttggatataatttaatcgagtattttgggtaacccttatagatactctactaattgttttattattccagcaagaattaggctatttctccaccatacaaaaaaatgatcggctgattttttcactaattcaacaagcacttttttcacctccaactgtgctaagtatgcagagatacattggatcttacaatacagtagaagcacatatatgcataactgtaatacaagacaaattgttaagtgccattggagaggtatgcgtgaaatactgtggaatttcagagaaagaggaagacactttcagctagactaggaactcccaaggcttttggaattagcatttgaatggaccctgatgtatagctaactgaaatggaaatgggggtcggggtggggaagagaaatgcctgaaagagggagcaaggtggaacaatgtgggaagtttataggaaatactaggaagtaggaggtaagggaattgagttggactggtaaagtgagtcagatagatgacatagaacgctagtctaagatgttggaattaactttgtagtggggaactatttgaatgcagaatttgtgtaatgcttttgaaattgctttttaaataaaggatttggcagagaggaggaaaaattgcagggtagatcattttaagagtcctgtaccaggtcagtgacattaagaatgtaaaggaggggtactagatgtatgggtaatattatggaaataaaataagcaggatatggtagattagagttaagagatgactcaagattttaaatctgagtgggaggaggatggttataccagtacagttaatcaatctgctaccatgctgtctggtagaagggcaggcttcattacttctctgtcatttactagcaacacttcaacatccagctatccactataacaaagtatcaccttaaaagcaggagatctacaaatttggaaaagagagctttatttcttaggaagcttgaagcctgcaggcttggaagtgtatcctcagacagagaccaaaagcaagcccttcaaaggaggaagggtgagacaggaagttatgttgaatgggttggctaagtatacatattcaacagattataggaggagctatgaatattcatgagggggtgcacacaagcttagtgtgcacactccatgttacatacatcccatgttcactttgagttggagacctaacatttaatcatagtaaaattaaggtttacatgtcaaaaggtgaaacagagttcataggcatcctatgtgcagccttcatggaccagctagaaccagttggtgatctcttatcagtaaggaatgctggtcagttcaaaaccacaaaaacagagtggagtctggcttctgagttaggcaattggttgatatcagtggggagcaagtcttttgaaagggttggtttctttttaactcttaggaaggaaagttttatggtggttagtgagggaggggacctaacgagacttgctttacctcctgtcccatcatggctgggaactcaatttttaaggtttctctggggtcaccttggcaaagaggagggtgtccattcagtctgctgtagaacttagaattttatttttatttctcaaaagcaaataaccacacttgttgaatcagtaagtttgtttttaggagaatatagcctaagagttacaccattgtagcataaaatacttaaattttatgatgcttgttttttgctgctcattggtttcataaggaaggtgatctattttgactgacatcttgtttttcatgcaagtcttatctagtttcctagcattactattggtttaattatttactaagtttctgggttttgcttttttttttttaatatatgtttgggaatcttaaatatatctaattatatcttcagttataatgtttgtgtttgctatgatttttattctctaagccttaaataatgagattcagaaaatatcattaggtatagagtttattcaagcccaaagcttgaggatggccacctgggagcataggttcaagttgccctggcatatacactgtgattagcagcagttacaagtgtatttttaagaaaaaaagcggtttctatgtttatttaccaagaatttacattaagataacgtaagctatcgattggctatacattgttctttgtatcacagatttcaggaacataaaaataatcgggtgaggcatcaggtcaggaacataatgaatgcctagtttaaacaattgccctccccgcagtgggggcatgagagtcaagtgactgaagtcccctactccagtctttctgggcctggtaaatcttgcatactgtgcatagctgactgctgagctgctttccttctctctaacatgaatttcttgaatgcggtttgtaatctggattaagatagaattagcccttataatataacaaggcatgtggttggccagagctaaattttaggtaatgttttaattgactttacggaaataataaaataacactcagactttctctattggaggttagggcaaaaggatggcttattggtaggtagttcctcacttactgcagaagtagaaaaaagtagaaaagtagaatttacttttttttttggtatgcctagggtttgaagaatgaggttaattcttgttatccaaggtttatgtatttaattgtagcttagctggaagttggctaaaacagaaaatatctgatcaataccatgtttggttatagtttgaattttggctggaattacacgtgtaaggctcttgagaactataaaaagccaaatcagatccattgcgaccatggatttgtgccatttagatttactaatatattgttgtgagtcctatctaatttaaggtaaatatgattgtattgaaaataatttaaaggaaattttaaagttaggtggttttcttagctaattttatgatcaagaacaatttaattattgttactacatctgaaatgatatatcagaaatacggagattttagagggcagggactgtgattattttgtttgtaattctcaacaaaagtgacttaaagcagattgtcattatgtactttaatgtttattctaatttcagatgtgtcttacaaaagtggttgatgttgatggctaatgcctattttgcttaataaaacggcatacaagtccaacttacttgaaaagaaatttttaaatgttattttcttacctgttaccacaaagaagtaatacgtttgctatcctatcaactcagctgaccagtaagccacttgtagttgtgatattgttagcttttttagctttgggtaagctgataaaactagcctgcctctaattcctgtttataaaaatgtgtgatgaagtatcatatttatgtccagcttttccctttatttacatagagaatacttgctcaaaataccctttagtaatcatcccctctactttgaaatagtggagtcttctacaaattgtactttttctttaactgaatccattcaagtttaaataaaaggctacttccatttcctttaactctttctctgaactataaggctgttgactatacttaatttaacttcctactttgtaggacaaactcaagcaaccagtccttgtggactaataattgtaaaaccacaaacctaattcttaaagcaaaggaaatctgctttccaggtattttgcatttcatcctcttccaggtaaattattaaaacaagcaggaactagttaactttgccactgattgctgtgtgattgagttacttatctttttttcagtcattgggagtggaaactctaaaaattagtgaaagttatttagggtactaaaaaattacccaattttagagtgaaaatatcaagggaaaatgttgatgaaaataaatacttttgaggtgaccaaatgtgtatctttatacttcatgcctgactgtaagggaaacattgctttttataatgtaaactactcatcttgggaataatgaagtggtatagctaggagcaaagaactgatgttgataggagtaggggagtccttttcaattttaatactgtgtagagtggggatttaacaatttttctcagcctttttttttccttttttgaatgggccgagagattgaggggtggaactgaatgcagcctttctcatttatgatagtagatactcaggtcccagggctgctatttgcaaagtccaatgcaaaatgagttatgtggtagacctcgttcaaaaattaatagtttcaaggctgcaacagtagagcattaaactgagtgtggggctctccctatgtgactgtgtaagttggacacccatgaagctggtctcctaggcactttgtacagaaagaaagataaaagctgaataaatgaaactttggcttctcagcaattggctttctctaccccattcctgttttacacaagctagcatgtttttgttgttgttgttgttttctaaaaaaaggccctgattctttttcatttgaggccaaaggaaagaaaattatatttgcagtctttttatatgcttggggcttatgaaccttgaaggattagtgacaacagttataattgaatttattactaacacaggaacagaaaaccaatactgaatgttttcacttataagtaggggctaaacaacgagaacacatggacacaaagaagggagcaacagactggggcctaccttaagggtggagggtaggaggagggagataataaaaaaaactacctatcaggtactgtgcttattgcctgggtgatgaaatagtctgtacaccaactcccgtgacaatttacctatataacaaacctgcacgtgtacccctgaagttaaaataaaggtttaaaaaaaagagttgagtttatttttcttacacttgtgtatcctttggcatgtgtgcatcctcttcccacctcaccactgccagcacgacctccagcaccaactttttaatagtgatagaatgatgatttacctgttcgtgtcatgtttattcctactgtagttctgaatgagctcatagctaatattgtccaccaaacttaacacaggccaaccacttagagaagaaattttcttccctctcgtaggggtatactgtgcctcttactttgggtatagataccccagttgtttcactttgtcctagagataccagcaaccaattagaaaagaaatggattaaacaagacttttaagttattgggcaggtgagaatgattacaaataaaaatacttaggtggcgaatgttaatttagttatggtgtgctttatcaaagaagttccagatgtttttatgaaatctcattctcttgggtcatttatatcgtgaaggaaaaagaaaatgaaactcattgaagcaattattgtataaaatgggcagaaaggtggaaagagcaaaagattttaatgtcaaagtcaaaagtaaattcttaatcttctttgtataaaactaaataatggctcagaaaacagacttgaatttttatgtgttgtgttatctatttatttgctttgcaccaatctggtttagtgctttggcatgttgttgtcgtcatggtcattggtcgtcgtattcatagcatagcagtgtggtgttctttttgaggactcatgagtttattgtatttctctttcatatttgtatttgaccaagacaaatatcttactgaaaggtatattctattttttttttttgcatttgaccttacagctcaatttattctccgtatgagtaaaatattctcagtagcaatttagatcttttataaatcaggtaacttgaaagataacagtcttttggttgaaattgatcacttaaacagtttctgcccaccgaatagtaatcttaggaaggtttggatgactggatttgtttctttctatagaagcttatgcttgagaagaaaattaatactttctaaaaataattttttaatatatttaaagtatagaaacaatgttagatttaaaatactttgtaaagagaaaagagtgtgtgggttttttgtttttaagttccttggagttttttggtcactaacaagtgcaaataaaatcctattacaaaaaaaggctttgtgtaacagttatctatttggcagattattcatataaacaactctgttaaagctttggctgtttatcacagatactgatgagctgcattatattaaaactgaatgtgttagtgatctgtatttaatgttctagtggctcctggtacagtccagaacaaaactacttttccctctagatataataaaatctcttaagtgagaatattggtataacagacatgtttctacctcatccttttcatttattgaaattttctgtgtaaatcatccttttatgtagaggatcctatatagatgtcccctttttgtgcagttttaatatgttaaatactcaattttaaacagattttcccaaaggtatgggcagtatcacaggagtgggtttggatattggcattagaaaaactattgtaaaatatgttcatgtttcacctgctcaaaaatataacatttcaggagataataaatctagaattgatgaagatattaaaacactgaggcatttagatttcaatttccaaagttcccagatttttaatattttaactttgtgaataagtttctagggattctcagtgcatgagattctgtaaccttaactttggagccctgggttctagagatgattgatcagtcataagctggcagagttgtcctgctttccaaggttataataccttcaaatactcattgctacaaaaatgatggcattctcatttcaagtttagatctgatcattcataaaacagcctaaacttaagagtttccacagtccataaagcatcaaaagccataaaataattcttttttccctattaaagaaaaagccaaaaatatttctgtattttagaataaacatttccagttccatttttaaaatattaacaacatgtaaatttaaatgcttttgtaactgataaaatgttcttttgcatatttccctaccatcctcctgcccttcttcctcaatttgctttacacccctaacattaacattctgtgaacaaatttttaagggttgttataatgtattctatttgtatcctacagtaatttatttgcattttaaaaggagtttgaatacagtgtggcaattttgacaaccagcaagctcatcaaagtaagattctacctgtaatcttatgatacaccaaatgcctgctctattctgcctaacacagacaaggatccatctttacagatggaaagaatagctgacatctagtagcacttactctttgagttccctgaactctatttctagtgtatgaatcactcataacccacttaaattcagattgctcaccaaagcgattaggaaaaaggtttttcctactgggtacaaagcataaggtatttcactcttgtagttgttgtgaataacctagtttctgtacataagctggctggtcagtgatttatatctaggataatgaagtatgtgtgactgcagcaacatatttaaacaaatgatgcacaatgttgtacaggaatattacctgtattaaataggagtaaaacattttcattcataggctgtctaaatatcaatggttaaattactgagttttgctttatttttactccagaagtatttgttgagttcctactacatgcgaggctcttgactgagataactaataagatccttataagatttttctattccagagtttggttgtttagctttgaattacccattctttaatacctaacttgacttctagtagttctttacttattagactcttcttctaaggataaacagaaaaagactgtgtcctagattttacttttgaataggcaggtgacaggaagctgaaaccagtggcttcaatgagatttaggtttcttgtggttttgaattttctatatgacatttctgttatcattgccatttgactaaggaactatgtttactggttttgtaatagtagcatctattcttttggaatctggactttgaacaattcgtttcacagagtcattgaacagccagttccttctctcttacttagaatttttccagggaatttttcacatggcaggataatggaagaaaagccatttgggtaactcttctgttacatttgtatccctccccccttggatccctacagataaattcttaccttctcttcctgctaattgaccagcagcaccctggattgctatcatccctttgtccaaagaaatggtgtagctgtattcaaagacctataaaatgttatgtgctatctattgctacctataaaaaatacctttttttctttttaaaatcaggttgttttagaataaataaaggaaaagtcaattaatggaaaaatttcaagaacagttcacataaaattttggtctattttaatttttttttttaccttttcaaatcacattttaaaataagcagttggagaaaatgtaaaatgaaaaatatgtaaagaatagttagcattaaacatcagatccaattgtaaacttacgtgagataatatggatttatatttattttctagtaaaataaaacttatatgattgcataattgattattgtatatgcaatacaaattaagttcaaaaatgaaagttgagctttttttgtcctttcaaatgtagggccagcatacaattttaagagctatttattataaaattcatggtgaatcactatgaaaattgatttttccttgagcttttaattacattatccatattcccttacgaagttttccaagtatagaagacctacttaatggagcagtaatcaaatgcaaacttaatttaatgatctcaaataaaaggttctacttttctggaaataagattaaaccagatattaaaattatgtatgattataaaagtaaagattaccattattgtaataattgaccaatttagtactttcaagttatttagttacattttctcagttctagtttggtgtggtaaagcattatttgaaaaggcagtataggaagaatacagatagtattcttcagtacagataataccgctgtacagtacagataatattactgctattacagaatcagcaagttgaatgcatgcttcagggaatagggaaatgaatgcggactttttctaactgatttagatggtctgtctgacctctctagaaaaatatgtgtgtatgtatattttgaaatatataaggaatgttaagtctttctcttcccctttttagccttagattgtaagcaaaagaaatcaaggtcaagatctggaagcaagaagaaaatgctaacattacctcatggtgctgacgaggtttacattctccgatgcaggtatatgcctatattgccaaatctgatcagtttcttcatactttgctttgaaacatattagctatttcatttgggatttttaatttgtggcagagtgcattctcaacaatcaagttataaatgaacttttggagataggcttaaaatcttaattcagctcacaatatccgtacttcaacaactaatgaatcaagttttttacattagccaatagtaatgtaaatctattatactgtgatttattaaagtagcttggccaggtgtggtggctcatgcctgtaattccagcactttgggtggccaagatgggtggatcacttgaggccaggagttcaagagcagcctggccaacatgatgaaacctcgtgtctactaaaaataccaaaattagccaggctttgtagcgggtgcctgtaatcccagctacttgggaggctgaggcaggagaattgcttgagcccaggaggcagaggttgcagtgggccgagatcgtgccactgcactccagcctgagcgacagagcaagactctgtctcagaaaaaagaaaaaaaaaactggctttccttgtgtttatttggtttgtatggtttaattttgtttggtttgatgttttgttgtcttgagttctcgcttattgggaacacattttctctcccctcatagtcacgccttcttccgtactcacactcacacacaacacacatgaagaaacatagacacaatgccatttaaggaatgctaaactggggaagggtcttttctaaagaatgacatattttggagtaatagttgttgtttcaagtgaattaagatgtgtagatgttaattttaaaataataatgctcccacctatacaaagattactggagtttattatagctgttaataaacatatgaattgggagttttgatgttttattaaatcatttgactttagaaactttatcaattgctgtctttaaaatatgataaagtttattccttatgttttaggattttgtgtgaattagttttaaagaaagagaattggtcatgttaagagaattgttatctttctgtaggttttgtggcctagtctttcgaggacccttgtctgttcaggaagactggattaagcacttacaacgacatattgtaaacgctaatcttccacggactggagctggcatggtggaagtcacgtcactacttaaaaagcctgcctccattacagaaacttcattttctctactaatggccgaagcagcttcatagaaccaggaaaccttttaaatagccagtttgaattggatgtaaatttgaaattctttttttttaagccacattaaattatctgtttataaatactaaagcaggaaaatggggggaaagtgaattacagtgacatcagagcaaattgaatacttaaaacagtaagtagtctatatattttatatagggtggaagatgtgtttttaaggtttatgaagttttgttggttaactgtgttcactcagtaaaagagcagtacatgtaagcagccattaataaactgttgcacatggatacttatagacagacttattggacaattatgttttttgcagtgttaccagaatcaaggctctgtttattccccacaagacttgcatagaaaaataagatattatattttgtttgtatgtatttagtgttttgtataataccaagaaccgctgactaaatttactcaaattagggcattaaatatcatgtacttcatagtttgagactgttcactcaaatagggcagagtactattctatctagatgtgtaagtgttttttttaaaatcacatggaacggttttttttatactaaaaagtggagggagatttgtttaaacaagtatttctaaaagaaatatgtacatagttctggaaattatttgtggtaaggaaatattctttactccagttgcatttctcagacaataaagtggtgcatccatgctacctcctactttgtcaacaaagatgctatttaccctttacatttttgtatcataatagattttaaaaatctaatgttctttattgcaagacattcttttgttaacaggtttgtttctttttaatgttttacctaaaatttgacatgcttacaggacaggtttgcctcttactttatttaacattgtagaaatgtaattaataaacaatgctcactacacagtttagaatagacgttctcatttatattatcttccaaatttgatcagttagcaaaacttaatacaccaattaaaatatttctacatatgagaatgtttacaatttaaattttagaacttgttttggatgtgattatatgtacgaaaatcgtgtaacactatgctcatgctaagaaccgacataacagaattactgaaataaatgtgctgtgaggaatggaaaatatggtgcaggtgtcttggtcatgataaattgtgattctttttaaaaattttttccaaaaacaattaggtattttaatctgaaatcagattcctttacaaacaacaagtttttgtatgcaagcaccattttatttcatgtagtatggctaatactatagttgaaccaaggatatgcattgattctttgcttcgtatgtaaataaagttaaaaacagttaaaataaggagtattttggtagagtatatacatacctcactgccagtgaaattgctttcctatggtatatctccttaccagaaaaatctctaaataaaaaaaggtttaaagaaaattaaaatgtgaaa

SEQ ID NO: 998 - DNA, 344 bp, Homo sapiens
gatatgcaagcttctaatgctaaattagggctttaaaaaattccagtctgggccaggcgcagtggctcacgcctgtaatcccagcactttgggaggccgaggcgggcggatcgcgaagtcgggagatcgagaccatcctggctaacacagtgaaaccccgtctctactaaaaatacaaaaaaattagcaggcgttgctgcgtgcgcctctagtcccagctgctggggaggctgaggcaggagaatggcatgaacctgggaggtggagcttgcagtgagccaagatggtgccactgcactacagcctgggtgacagagcaagactccgtctcaaaaaaaaaaaaa

SEQ ID NO: 999 - DNA, 174 bp, Homo sapiens
cacgccattctcctgcctcagcctctcgagtagctgggactacaggcacccaccaccacgcctggctaattttttttatttttagtagagacggggtatcaccatgttagccaggatggtgtcaatctcctgatcttgtaatccacccgcctcggcctcccaaagtgctgggat

SEQ ID NO: 1000 - DNA, 122 bp, Homo sapiens
attctcctgcctcagcctctcgagtagctgggactacaggcacccaccaccacgcctggctaattttttttatttttagtagagacggggtatcaccatgttagccaggatggtgtcaatct

SEQ ID NO: 1001 - DNA, 191 bp, Homo sapiens
attctcctgcctcagcctctcgagtagctgggactacaggcacccaccaccacgcctggctaattttttttatttttagtagagacggggtatcaccatgttagccaggatggtgtcaatctcctgaccttgtaatccacccgcctcggcctcccaaagtgctgggattacaggagtgagccaccgcgccc

SEQ ID NO: 1002 - DNA, 344 bp, Homo sapiens; identical to SEQ ID NO: 998

SEQ ID NO: 1003 - DNA, 1988 bp, Homo sapiens
caacagagtgtcccgggactcaggcctctgatcaagttacccccagaggatcagagaggtagagagagctgaacctctcatttaggagggccggggaggagagggaattcttgagatcgcattcccaggctcaaatagaggaggaaagtggacaaagacgtagtgaaggtaaagaaggcagagaagaagggggagatcaggacaaccttcttaggtagtgagctccctgtccagggaggcattcaaatctgcccaatcaacattgataacaaaatcccttcctgaggggtagtcagtgccccatttcacagcagaggaaattgaggttgtcctttgtccaggacaacaaaggcaagagctcatggcaggctgtggttttaggggttgacgaaggagaagcattcagagggcactggcttctggacagcaatgagtgcccgggccacgcggccccgaagccggcgagggaggcatgctccacccgtaagtgtcaccctctcccctccacacccagatcctggggaccccaaggtcctgtcctgcctggctcagagcagggccccgggggtcatttgcagggtgaactggatcccgtggctgagagttcagaggaggtcgaggcagccagtgggagctccaagcccagctttgccccacctccggtgagctccgggctggagcagctgggccccatggaggaggtcagtggccaaggcctaggaagcaggtaagacccgcttggtctgtgcccttcactccagtccagacgcatctttgccatccacagatctgctgatgtgcctgctctgctcacacacctaccatagctccctattgccttcagcctgactttcttttttttttgagtcttgctgtgtcacccaggctgtagtgcagtgcagtggcacaatctcggctcacagcaacccctgcctcccggttcaagcgggagcctcagcttcctgagtagttgggattacaggtgtgcgccaccacatccggctaagttttgcatttttagtgagacagggtcttgccacattagccaggctggtcttgaactcctgcccttaagtgatcccccaactttggcctccaaaagtgctgggattacaagtgtaagccgccgccccagaagaccctatttccagaaacttctgtctctcaccttcaggcctttcccagtgcccgtcacagtccaacttcactctgtttctcagctccaggtctcccctccaacttcttcaccacctctatctagcctcttccttgaattcacagcctcccagtctcaccctgggatgccagtcccagaacacgcagctcttgccaactccctgctccgctcacacctccccaagaccatgaagtttaagccctcagaattccctgcccagggccgagcatggtggctcatgcctataatcccagcactttgggaggccgagttgggcggatcacctgaggtcaggagtttgacaccagcctagccaacatggtgaaaccctgtctctactaaaaatacaaaaattagccaggcgtggtggtgggagcctgtaatcccagctacttgggggaccgaggcaggagaatcacttgaacccaggaggtggaggttgcagtgagccgagatcgcgccactgcactccaggctgggcaacagagtgagactccgtctcaaaaaataaaaaagaattccttgcccagcatggagtgactcaagtgcctgagttggtgtccacaggactgacaagaagatggatgggggctctggcagggaactggcctcagcccccgaagtgccccacaaacctgcagtggaagcccaccaagccccagaagcagccctacagtacaaggagactgtgccccctgggaatggggcccccgatgtgtttcagaccctccagcacactctgagctccctggaggcagcggctgcagcctggcgccaccagccccccagccattctgggccgatggagttc

SEQ ID NO: 1004 - DNA, 2960 bp, Homo sapiens
gagctgagaaggagacgctgcagaaagaggtgagtggggccatcctgagtcccatgtggctctctgtctgagggaggaggtgggcctgatgtaggcaatattcattcatttgttcattcaaaaaaccttttaaggctgggtgtggtggctgacacctataatcccagcactttgggaggtggaggcaggaggatcctttgaggccaggagttcaagaccagcctcagcaacacagcaagactgccacctctgcaaaaaaattaaaaatcagccaggttggccaggcacagtggctcacacctgtaatcccagcactttgggaggctgaggtgggtggatcacaaagtcaggagttcaaggccagcttggccaacatggtcaaaccccatctctactaaaaatacaaaaaaaaattagccgggtgcggtggcataggcctgtaatcccagctactcaggaggctgaagcaggagaatcacttgaacccgggtgatggagatggcagtcagctgagatcgtgccaatgcactccaacctgggggacagagtgagactctgtctcaaaaaaaaaaaaaaaaaatcagccaggttggctgggtgcagtggctcatgcctgtaatctacaccagcactttgggaggccgaggtgggtggctcccttgaggccaggagttagagaccagcctggccaacatggtgaaaccttgtctttactaaaaatacaaaaattagccaggtgtggtggcacgtgcctgcaatcccagctactctggaggctgaggcaggagaattgcttgacacaattctgcagctaccagggaggctaaggcacgagaatcgcctgatcccaggaggtggaggttgcagtgagccgagatttcaccactgcactccagcctgggtgacggagtgagactctgtctcaaaaaaaaaaaaaaataataataatgctgggcacggtggctcacgcctgtaatcccagcactttgggaggccgaggcacagatcacgaggtcaggagatcgagaccatcctggctaacacggtgaaaacccgtctctactaaaaatacaaaaaattagccggcgtggtggcgggtgcctgtagtcccagctactccggaggctgaggcaggagaatggcgtgaacccgggaggcggagcttgcagtgagccgagatcccgccattgcactccagcctgggcgacagaagaaaactctttctcaaaaaaaaaaaaaaaaagaaagaaagaaagaaagaaaaagaaagaaaactgagggtggtgggagtaggccctggagtggcagcatgactggcctgttcaagaaacccgaaggaggccagtgtggctggaacacagggggcaacagggagagtgtggggagccagaacagaacagagggagaacaaatgcagatcgcgtagggcctcgtgggctgcaaggagacgcttgggctttgcttggattaaggtgagagccctggagggttttgagcagaggaggggcatgctcgacgcaggtgttcacaggcgccctctggtggcggaggtgagggtggactcctggagagccaggaggcgacttcattggtccagacatgcacgatggtggaggttgtagaagtggagagatgcggacggattctgggtgatgtggcagatggaactgacgtgtgagcgtgaaggctagagagaagtcaaggacaacttcaggctttgggacctgctggactagaagggagagatggaggagctacagggtaggcaggtttggctgggggtgaccagatctctttagcccttgataagctcaagtgtccatgagacatccacgtggggtcctcaagggagcagctatatgtctgagtccagggctcagaggagacagcagggcagaagggagaaacttgagcatccttagcacacaggtggcatttaaagccatgtggctgctgggtgcattgtctcatgcctgtaatcccagcactttgggaggctgagtcaggaagatcacttgaggtcaggagttcaagaccagcctggtcaacatggtgaaaccccatctctactgaaaatacaaatatttgtcaggcatggtggcagatgcctgtaatcccagctactcgggaggctgaagcaggagaatcacttgaatccgggaggcagaggttgcagtgagctgagactgtgccactgcactccagcctaggtaacagagcaagactccatctcaaaaataaaaataaaaaagccatgtggctgaatgagatattgagagggaagccctcatcttaggctggtagaaaaactttggagcccagtccagggattcatttttccccagagtggggcccatttttctgctgggaaaaataaaatcctcagcagctgagaaacattcccaaggtcagatagtgagatttttggcaggctaagtatccaagcctcttgccttccagctagggttcttgccacttccccaagaacaggccttggggagagagggctggtggttggtttgagcccctaggcctgacgtccccctcatctttcccaggttcaagagctgcaggattccctcttgaggctggagccctgcccacatctttcccacaaccaagcaggtggctcaggcagtggttctagcagctctgaggcagacagggaaccctgggagactcaggtgagtgcgagaagttcaatcccatggtcttgatgtccttagccttcaggggaatgagactcaaatctttgtcatgggatccaacagctttggggttgcaaaatgcctacaatcccaggctcttggtgacaattggggtcagttatatcacttcttcttggcaggactccttctccctggctcaccccctgcttcggcgcctccgcagccattccagcacccagatccttgggtctcttcccaaccagcccctcagtcctgagatgcacatcatgg

SEQ ID NO: 1005 - DNA, 421 bp, Homo sapiens
aaaaaaaaaaaaaagctgtgcttaatttgctccagagtcatctgacctagttttgaaccctgggtacaccaattttttgttaagtaacttcagaaaagttacttaacctatctatgcatcctaaccatctcacctactaagtggacatcctcattaaggttgccatgagatttagatgtgatgatgtatgcaaggtacttagtaaatattaggtattattattagcattattttccatgactagatgagcctgggttgtacctacgggtatttttcagcatttaacagtaatctattaaaattcaaaaatagttttacaatgatgagcattgtgtattttccttgaaagattttaagtgtcctgattgacctaaagtttctactcagttttcagtggaatattaaggttgttttattatgt

SEQ ID NO: 1006 - DNA, 421 bp, Homo sapiens; identical to SEQ ID NO: 1005

SEQ ID NO: 1007 - DNA, 308 bp, Homo sapiens
agtatcactgtgacggttaagaattatgtgtagtaccaggccgggtgctgtggctcacacttgtaatcccagcacattgggaggccaaggcgggcggatcacaaggtcaagagatctacaccatcctggctaacacggtgaaaccccatctctactaaaaatacaaaaaattagccgggcgtggtggcgggtgcctgtagtcccagctacttgggaggctgaggcaggagaatggcatgaacccgggaggcggagcttgcagtgagccaagatggcgccactgcactccagcctgggcgacagcgaga

SEQ ID NO: 1008 - DNA, 447 bp, Homo sapiens
tatagtcagtcccctgcttttatctattgtctgctgttatataggacaggcaaaactgggtcaacactgtctctgctgcttactagtttgtgactttaggcaagttaacttctcagagttttaattttattatcttaaaactggagtttataatagttcgtactttatagcattgttgtaaagatgaggtctttttaaaacataacaactagaactactctcaaagttccaaatacaaatgctattttctgtttctagtaattttcctgttaactactcaacatttaggtgactgttatagctgcagaagcacagtacgcttagagctttaggaagtgtcactaataaactatgatatctctaattaaatgtctgtaaattataaatgtctctaataaaaataataaagtaaatcttataacttacaatctaacaaattataagtta

SEQ ID NO: 1009 - DNA, 311 bp, Homo sapiens
agtatcactgtgacggttaagaattatgtgtagtaccaggccgggtgctgtggctcacacttgtaatcccagcacattgggaggccaaggcgggcggatcacaaggtcaagagatctacaccatcctggctaacacggtgaaaccccatctctactaaaaatacaaaaaattagccgggcgtggtggcgggtgcctgtagtcccagctacttgggaggctgaggcaggagaatggcatgaacccgggaggcggagcttgcagtgagccaagatggcgccactgcactccagcctgggcgacagcgagactc

SEQ ID NO: 1010 - DNA, 447 bp, Homo sapiens; identical to SEQ ID NO: 1008

SEQ ID NO: 1011 - DNA, 566 bp, Homo sapiens
  misc_feature (39): n equals a,t,g, or c
  misc_feature (56): n equals a,t,g, or c
  misc_feature (201): n equals a,t,g, or c
gggagctatgtcagacaggtagtagcagctctgtgtggntgactctccactggccntagcatttccttaaacaattggaagtaggagggtcttgagaaggggatccccctctgtgaagccccagcaccatccaaggtcagcaggggcctcgttcccatgcccagaggcagggtgagataaggggctcaggtctggctgtcncaggctgctcctggggcccagccagagggggcagaggagccgaggggggagttgggggggatctggcagtcccagccctgcaggaagtgtttgtgcatccgccccggcggaacctggctcccaatccccgactgtgagaccgcctgttcttccttccagtccgaaggagcttacgacatcatcctcccacgggccaccgccaacagccaggtgatgggcagtgccaactcgaccctgcgggctgaagacatgtactcggcccagagccaccaggcggccacaccgccgaaagacggcaagaactctcaggtctttagaaacccctacgtgtgggactgagtcagcggtggcgaggagaggcggtc

SEQ ID NO: 1012 - DNA, 946 bp, Homo sapiens
gggagctatgtcagacaggtagtagcagctctgtgtggctgactctccactggccctagcatttccctaaacaattggaagtaggagggtcttgagaaggggatccccctctgtgaagccccagcaccatccaaggtcagcaggggcctcgttcccatgcccagaggcagggtgagataaggggctcaggtctggctgtcccaggctgctcctggggcccagccagagggggcagaggagccgaggggggagttgggggggatctggcagtcccagccctgcaggaagtgtttgtgcatccgccccggcggaacctggctcccaatccccgactgtgagaccgcctgttcttccttccagtccgaaggagcttacgacatcatcctcccacgggccaccgccaacagccaggtgatgggcagtgccaactcgaccctgcgggctgaagacatgtactcggcccagagccaccaggcggccacaccgccgaaagacggcaagaactctcaggtctttagaaacccctacgtgtgggactgagtcagcggtggcgaggagaggcggtcggatttggggagggccctgaggacctggccccgggcaagggactctccaggctcctcctccccctggcaggcccagcaacatgtgccccagatgtggaagggcctccctctctgccagtgtttgggtgggtgtcatgggtgtccccacccactcctcagtgtttgtggagtcgaggagccaaccccagcctcctgccaggatcacctcggcggtcacactccagccaaatagtgttctcggggtggtggctgggcagcgcctatgtttctctggagattcctgcaacctcaagagacttcccaggcgctcaggcctggatcttgctcctctgtgaggaacaagggtgcctaataaatacatttctgctttattaactctt

SEQ ID NO: 1013 - DNA, 284 bp, Homo sapiens
ctcacacctataatcccggcactttgggaagccgaggcgggtggatcacgaggtcaggagattgagaccatcctggctaacatgatgaaaccccgtctctaataaaaatacaaaaaattagccgggcacggtggcgggctcctgtagtcccagctactcgggaggctgaggcaggagaatggcgtgaacccgggaggcagagtttgcagttggccgagatcacgccactgcactccagcctgggcgacagagcgagactccgtctcaaaaaaaaaaaaaaagat

SEQ ID NO: 1014 - DNA, 297 bp, Homo sapiens
ggaaaaggaaagacagggtaaatctttgtaaaagggatattgaggatataagcttggaaaagtggacacatgatcagaaagtcaaatagaaatagacagctattcacctggaaataagaggtaggttatttatgtttcagattaaagaaagaaggttactctctaggatagagagcaggtctgtgtttcaagcttggtttgcaagatgtactcagcattgaacaagaaacactgtagttaaggggtcagaaataaagcagtttgttaagacagggagggaaaaatttgtgcccaggc

SEQ ID NO: 1015 - DNA, 297 bp, Homo sapiens; identical to SEQ ID NO: 1014

SEQ ID NO: 1016 - DNA, 335 bp, Homo sapiens
cattattgtaaccagtttgacctacaggcaatgtgctcctgacaaggaattctcctctgcccattcaagtaatcaaaaccccattaaccttttcacgcatttccctctgttcctagcagagggcaagtatgcatacttaaaataaacaaaaatgaattttaacgaattaggtagaaatctcagtgaggatgacagagcaggtctcactcttagaggttacagcactttacaatttgccgcagtgtttggaatgtccctttgcccttaataaacattaatgatctgattatatatttgttaccattagaaatttcattttatttccactctgcagt

SEQ ID NO: 1017 - DNA, 13435 bp, Homo sapiens
ggagggcggcggggacagacccgtcgccccggctccgcagccccgccccggccccgcctccgctccggccgccgaaggctataagatctaggaacccgagccggtggtagggcgggcgcggaccgtgctgggagcggcgcggctggagcgcagcgccgaagggactggcagggctgaagtgtgcgggacagcaagcccccgaatagccccggctgccacctcgcaggacccaaggccacgcgcgccgggcccagctgagccgcctcatgaagccgcccgcggcgcagggcagccccgcggccgccgcggccgcaggtgagtgcggggtccggggtccccttaaagtctcggctctgcagatggcgggtgagaaaggaggggccccgtgtcgtcccttcacaccccccacccttccatcctccccggcgggaacctgtccccggtcttcccgcgcgggcggctgcagcctcctttccggcccgggctggcccccatgtcccaccttccctccaccaccagctccgcgcgcgcccggggttggggggagcggcggggacaggtaaccggcagcgcctggggaggaatctggccgcgccaagtcgctgggtgaccctgggcctggcgaaggctcagttttcttgtctgtaaaacggacttggtaatagaacgcacttcgggggtggtggagaagattacaaggtaacagcgactgcgtggctgtcacttggcagaggcgccaagtgtcagttatcttcgggaaccgtggcggcccctcctggccctgggaggtggtcccgctgcccccctgacttccgtgcactgagcccctggccctgcccgcagccccggccctggactcggcggccgcggaggacctgtcggacgcgctgtgcgagtttgacgcggtgctggccgacttcgcgtcgcccttccacgagcgccacttccactacgaggagcacctggagcgcatgaagcggcgcagcagcgccagtgtcagcgacagcagcggcttcagcgactcggagagtaagtgcggcccccgctaggatggcgccgggatctcccagctcccaggacctgccccgcgaaggctgcggcctcagttttcttatcagtaaactgaggaatggtttcctgaagctcaacgcagtaggccgagtggtggcggggcccctgacgataatcacgggaaaggtcgctggagggcaggttggttcacttgccgcccacgggtgtgtcaccaggcaggcgagtttaagcagcttgtcccgactcagccagacaggactccctggacctgcaccaggcctttccgcagtttccctcctcttctcctttccgtgcctctcccctctcagctgtaactttgcagatgtggaacaagtgccagtggaatgagggggcacagtggggacatgggagggcgcagaacggaaatattcatgaaaccaggaaaggtttcataagcccaaactgctgttcttgggatttatgaaataactgcttgcattgtcttctggcccttagctctcagacttgttgctccattgcatgcagttatgaaaatctttggcactgctgagttcaagtatttttcagccaggtcctccaccaggctggagggggagccagagagcacatgggcatgaaggtggttcctggtgatctttctcacaatggagactaccccagggtctctttgtcctgaacaactttgtcaacaacagcaacaacaacaaaaacaacaaaagagacagctttttccaggaactcacatgtcctgggaggattacaggtacctcaaacagcaaattaggtgcctttttaatattacatgattgttggtttcaaatccagaattgcttattgtttttcaaagggcaaagtcaattttaaactcttctgtgttattcttcagcctttaatccttagatgggttacaggcatgaatgtcactccttttgctgcccttgactcaggacgtgaaagtaatggcctttccgtgtgattctcttattttgaaacctggagctcttccttgttcctgggctaagattcggggctagacatgaacatgagctgcccttctgcaaagggataaatgcgctcaccaccctggtcagggtttgactcaggaagctgagttccagcttgtttccttggcagcactgccaaagagttagaccaagctgcagcttttgaggtgaaaggggatggaagaaagtactgttacttttccacttagaatttttggactttgttcttaatgaataggttcattttcaatttcaaagcaaagtgttaacatttttgaaatttgtctcaattctaaaggccaaacttaaatatgtctcctcctactggggcatggagcaagttattcatcaaatacagattctcgcatggaaaagaaagctaggatagtgtgtcgctgctgctctgtggcaaagaacagctcctttctaagcaacagcctcactctactagaataggtctgagcgcgcccattcatggctgattgcaacttccactgggtgggatttcagatctagaatctgttttcagatgccttaaagagaagacatagaaacacattcttaacagtttcaggggagatagttgggatagtttgtagttttgcttaggttatatgtgtctgttttctgcttttgttgttaacggactaacccttagtttggtggttagagaagtgatgggaagaacataaagaaagctcagatgacatttgtctttgctttaaatgtgtagtttttctctcacaaggctagtcagaaatattgttggcagaagctgtgtgtatctaaatagtaatttcttaaggaagcataatatgtatatcttaattgctgccaagaattgagtacagacatttgttatcctcgtttgtctgtttaatgcttttctatgggagagaatgcttaagagaggtagatactactgaaatttagctcatcaagagggagacacaccaggataaggataataacagcagctcacttttagcaaacgcttgttatgatgatgatgatgatttattagctggaatgggaaccatgtcttcacgaatagactgaagtccttttgagcccagatcacatgcctgtttgtcaatgatggctgtttatgaaggtgtctctttgaggtggtggtcatctggcagggtcagtagagcttagattgagccttgtcaaggccctgggtgatgagtgggatttagtttctctagctgtgaaattgaaaggatgctatttaatagtgctattagggagaaaatatttgctctgttgaatactttcaaaatatcattacaatgtacatgctgtgctataccatatagatacattggagccagtgtctcgcatgaaaatattttggatgaatatgtaaaccaatgttacctttgttttttgctctagtttttacagctctgtctgaaggtgcaccaaccttacaaggaagatcaaacagcaagcctgttctttgaagaatacttctttattatcattaaaaaaaatttaggttgcttgcacccaaaggcaaaaaatagccattcctcgtactgaaagaaacaagttactcagataggaaagaagaacagatatttaataaggaaatattccttcctgttcccactttcagggaggcctcttaagacatgaagaggaccaaaataacaattgcagtataacttcacatggtggggtggggggtgtggagttcaaatgtggttgatcaaaatagtgttgttactttcgtttagacttgattccaacatgtaaaaaaatcaggcactttagtgggagtgattttaacttcagtagtgaaagggcaatgcaattaagagttagggtagtgtttctcaaacttcatcctcagaggtgctttagaaattgactacctttggtttgaatttatttttagaaatatatcttcttttcagtatttttaaaactgtaaaaggtaaaccatgttttctcaaatgtgttaaatggaattttaactcattatgtttcaagttttaaccagtgtgttgactttataagaagtttataatattaacttaaactttaaaaggtggtatgcacttatacctttaaggtattggggtttcacataatttttcctttgacgggggagtgttttgctgctcaacagaaaaggtctgaagtctactgtgtatgctagggttattatgatattgtaggaccatttaggaaatgaggaactggcttctttagcatcagcaagacttagaacacctgcatatctttgcttaggctattctggcctggccctgggagaggggaccttgtgggccctggagaaccagcatgacagatggcttatgtggcttagaagccactgaggtagaacctgaacttgttcaagccatgagagaataaggccaatgaggagccttcagggttccctggtactgtgttagcaattctgcatgggtaatggatcttgtgatgcttggcaaggcatatagagggacagtgcgatcccagaaagggagctgggacaacagtggagaagttgaggaaagatgctctttcttattttgcccccctttggcgaggctatcagaatttagattttcaggaggagaagtcaacccacacccccagccattccctgtggcaaaagggaggtaggtccaaagctttctttttcttggttaattactatagtttgcttgctttaaacgtgtgggatcgttctatatttacaggagccttgggtaaggtttactgtctgtggttttacttccccctggagcagcacgttgacatgcgctaaccctaaattacctttctcccaacccccctagctaaaaaaacacacctaccttttaaacaagcctctattttgcagcagtgtttctcagactctgttagttgtatatttcatatgcttttctttcttttgatggtgccttagaaaacacggtcccagaatttgaggttcctgacttcagtacactaactagacttgccagggatgtttctaatgggaatttgagatacatgtgagatggtgctttagagctgattgaagccgatattgtaaggccctcaaatatccagccttaccacctgccagggttccccaaattatcactgttctaggtccttcgagcccctattaatagcagcacctgatacccacgcggggcaataatacatgaatatgtgatcagccagcaacacattgctgtcatttaatcagactaactggctattacttttgcaaggaatagagttccaggggagggaaaagaacaggatgtccggctttgcctaccttgaaatctgtcttgcgtgagattttgcccattgtatgttcttaataaaactctatggaaagaaattttattggttaagggtaaagagaggtctagagcttggggtacctctatgttgagagtttgttcttgggaggtttgttctaggatgccactgaagagaaagttctcttaagaatgttgctgctctctctcaagaagagggaggatcttgattctgtttattctctgtgattaccttttctctctcaggagtgctattctgcactttgctaggaactttagagttaaatcattaaaaccacaggcattatacacagagcacctaggttattgttcttcttctaacaaggaagaaacagagtgactctacagggtcatgcagttttcacgtggcctctagacacccactcgacagtggcatagatgctagatgcccactcgccagtggtgtagctttggggccttgagggctctcttttcatctgtgccatacacgatgtgtagatatcatcacagggtgcgcctcagctgcagcaggtttggctcaaggatgctggcggtcggcttcttcttggtggtcgaaggttgaacagttcaaaacttggagttgggtctgtcccagattgtacacctcacggaaagggagtgaagtcatggtgtggcaacgagctggggcgtgagctaatgtgtatctgtgtgtgtgtgtgtgtgtgtgtgtgtgtgtgtggtgggcagggcgggggcgggcaggaggaagtgagtgtagctgtgctgccatgcctctgtttgcgtgtgtttctatataaatagatattgtaactagtatttttcctcctcttcctccctcactgtgggagtggctgtcagtttgtctgtatattttctcagtttgggaaaaattctcacatcaagaaggcatttagcctgtgaacctaaaggatcagaggacagtcctggcaatattctggatctacggctcattctctacagattctctccaggccccatgagttatgctgagtctttcctgaatctttgctggattccttttttcccctgctaacatcctcttttgtaatggcctttccatatctagattgttccttcttccaacattcaatagcgtttggcctccttgcctgtgaggtgaacaaattgtggtgtctttctcccctgcagaggagtgtacgtggatggaaacttgctggagagtaggggcagaagagagctgaagttcaaagtcagggtagggcctgtggtgcatgccgggtgggtggagtgagcagtggtgtggaaagttgctctcccaggccagctgcttgtgggagatagagagcggaggtgtggtccctgcgatctgggccagccagcctctgggcccagggatgggggcgaagctctcaggtatccttcatagccacggataatgtgccaagggcctggtattttctggctcagagtctaggcatgaggcctgcctcctcaggaccctctgtggttttcttgcccctaaattttgccttatcttctccccatgagtttctcaggctgtatttgtggcgattctcctggtgactgcatggtgacaacagtaaggcttccttgcaggtctgcagtgggtgtggccagcttcctgtgtgtaggggaaagggcttcccttgggagaattggagagcccacctttggaggtgggctcggttgagggagccagcaggagggcttcccaagtaaggttccacggagtccaagggtcctgagaagtagtagcaggagcaccacaaagaagtgtcccgtggtcaggtacactggggaaatggggctggttttgtttaaccgcaagtcttttcaggatgttggaagtgggcatacccatgggaatgagcaaggctgtttggtgtttctcaggtgtacctgatcacacagccctcggaggaccagcactctgaggaatgtatttttggggaagtgtaggtatcaggtccaggattttggatctcagtccatgttcatcctcaaagcccagtgatggtggtcatttcaggtgagctgggctggacctctgaaggaagcaaagattgtgagggttgctctcaagggtcttctgggcatgtttggaaaagtggacaagatggcggtgtcagcgaaaaagagcagggggcaggtgggcccctgggcaggagagggtggggggaaagggagccaggtgaggcacctgagaagttgtggcagcctcttagggacaaagctgaatttccctgagactagaaacctcttcttccgaaaactctgatactttttgtactgggcctatctcttgtcacttaggcaaattccttttcagttaatgggaccaaagagagatgtttttgcctccccctaagctggaggtagttggcttaaagtggaagaatcccgaggaggcggggacctggtaaggcccccatcattcagctgccctctcacacctgaagagccacttctctgctccaactgtggctggctttgtgttttgttttaaccaggaaggctgttccccgtgacctcaggggccacatcctgcttctgctgcctgccttgcctttgcaccctttgagtcagtgctgctcagccagcagcccctttctgagtcacagccacacagctgggccaaccgtgcgttggtttccttccccttagcaggacttagagaatctcagaactttagagctagaagtgcctttaaggattatttagtccgccttcccattctattgataagtaagctaggcccagagatgtactagctcaaaggcaccctagtacttagtagttgactggatggtccccttgactcccagttcagccttgaacttctggggcctcatcttgctgtggttcaagtctttggaggtatgagaatagagggagccatgatgtcactccaagtgtctaatagatgaacttccaggagaagatgtctttatctttgaccttctggcttatctgaagagtacagactcttaggaaaacctctcttaagtaaaagagaggattattaaattataggacagcaagagagcaaagatctctcttgagcagggaaagaggcttaagtcatgggatactggatgtttgtattttaggaggctcagagggcagaagggacatatttcacttgagatgattccttttgcctaaaatccttacccccacactcccaccatcaaccaagcactggtcatgatgatcctatcacccccttcctgtattggggaagcaagggcctttggtatacttgatttgacacacacacactctctcacttctcactcacactctcacactcacatgctctcacacacacactctcattttctcacacacactccacactcacacacgcacacactctcacacactttctcacacacacactcacacacactcatacactcacacactttctcacacacacatattctcacacacacccacactcacacactcatgcacacacacacactttcacacaaacacacacacacactttctctctcacacacacacactccctctctcccctgtctcgaatcattttgggggcataaacataaaacctggaaatcaacctgttttctaatctttttttttgagacagagtctcactctgtcacccaggctggagtgcagtggtgtgatcttggctcactgcaaactccacctcccagattcaagcgagtctcctgcctcagcctcccaagtagctggggctacagacacacaccactatgcctggctaatttttgtatttttagtagagatggggtttcaccatgttggccaggctggtcttgaactcctcatctctggtgatccacctgcttcagcttcccaaagtgctgagattacagccgtgagccaccccatgcctggctgttttctttactatagagttgcagctttggcttattttgaagacaaattgttggttatcaatagactataaagtgctaagtctataatctcatgagtactatttctaatgagtatattttccttcctgaaaggtgcagattcactttataggaacagcttcagcttcagtgatgaaaaactgaattctccaacagactctaccccagctcttctctctgccactgtcactcctcagaaaggtaaggtcattagttggaatttgagttttttgcttttttattcctctctccttctcaatcccttctctgtcccttttatccctaaacaatctttctcaaatgtacaaaacaaataggtaagactaatgtcttaatactgtagagtatacagtggaattttttatttctcaggattttaatcagtgtgaacatgaaatcagataatttggggcagaaaacctgaagtcacagggagaaagaaaatttggagactagactgttctctctcatgtgatgtaatcaagactgtgcaaatgacagtgtttcttaggagtctcctcccagacttgttggttctagaatttaaaactcagcagtttgcctttgcagatagtgggattctttttattgcattaattatttaaccaatgctttcagatgaccaatttagcaattaaatggggttgtcattattagataagctatgatctaacatgatttaaaatagcagctccagcctgtctctactgtggtattaatagacctaaaatgtctttaaagatgcatgagcagtttcttattttttggaactggtaaaatgtctccagctagagagttgaatgttctgttacattggacaagtgcctttttgaaaacaaaaggagctttttttcttaagaaaagttatacttgctgaaaatagttgcagaatgcaataaaaatggaacatagttaaaaagaaatgacaattccatcactcttttcactttggcaataagacaggacttcactcttttttcagaagaggcatttgaaagttcccttctcaacatagcaacgttagcacccactgggaattctgccactatccagccctcagtctgtaatgaatcagttgaattcagagacagagcagtctaaaaagtggcttaaaacgtgctcagatttgttacctgatcctcaagaggtaggaattaaagagggaaaaaaagcccctagtggcaaattgacttaaaaggctaagaacaattagccatttgtagccagcaggtgttaattaataaaactgtccagtactgcatttcagggaaggcatgaatgatgtgatgaactctacaaaaataaagtcagctatatgaaaaaaatctctacatctcaggctctagagagaaccaaatcagaatgaggactcgtttccttgtgtgggcacctggaggggatgaggctgtcctgggcccagaagactcatggcaccttccctgtaccattttgataagaaacagtgaactcttcattcatttcatattggaggaactctgagggctgcagcgttgccctggggggacagcacaagcaagaatgcatcagaaggctagtgccgcaggaatgacacaatctaggtgtctgctctgcacagtgctatgcttactgaattttttgactaataactcatattctacacaatacaaaaaccagactccttttatcttcccttcctgctcctcactctcctgcaaacatttaagacagtgaaggaagattcctcttctaggtgagggagaagtggggtgggatgtttggagagggtggtgatgaactaaaaaataaagaaacacttaggctagtcttcagaatcagtttctgagtttactgtatcaaaacactggagcacacacttagggttggcccaggacactcttcaataaaagtctctgaagataaggaggtagatgtaaaatagaaataatccattctataactctggaagttccaacttcctggaaaactcaatatggagtcatcagctgtctttgttatggaaactgaactctctctctctctctctctccctctcctgtttcacagctaaattaggagacacaaaagagctagaagccttcattgctgatcttgacaaaactttagcaagtaagtacatgtctgatattaaaaacaaaaaaacaaaaaactaacagacacttctgataaagtgttgtaatgttaaccagcttgccctggggcagaaagtttcatcctaagccttctataggtttagaaacaggaccctaggccggggcagtggctcacgcctgtaatcccagcactttggaaggctgaggtgggtggattacctgaggtcaggaattcaagtccagcctggccaacatggtgaaacccaatctctactaaaaaatacaaaaattagctgggcatggtggcgcacacctgtagtcccagcttcttgggaggctgaggtaggagaatcacttgaacccgggaggcagaggttgcagtgagccgagattgcgccactgtactccagcctggtgacagagcaagactccgtcaaaatagtaataataataataataataataataataataagaagaagaagaagaagaagaagaagaagaagaagaaacaggactctagtggctaggaatgaaattctgggataagcttgtgttaaagtagaccatgtgcgtttccaaacagtgagaacaggtcactagcaaacaatggcattttgtttgagaaatggagagcgagcaagactggagcattaccatcatgatggcctgtcaggcttttcagagaagaaatgaactgattaaccacaagtgcattattccaacaagccaaaagtcttccatcccatgggccagggtaattttcccaggttagatccagggtttgggtgaaatttaactttaagatgtgggtgccaaaagagagaattggcttgtggggcctttcaccagagacccatgccagtgactgaatgacctggattaggtatgcatacttgcaagcctcttatttgggaattacactaatggttacctgttttgtgtgaccaaaaatgttgagaactgaagacatcaaattataactgcagtataggggcccagaagaagggaccctcacaatctatctacacactctatttccaaaggataagattgcaagagccaggaggaccaactccagcttctgggatggaaggttcagcaactctactacggggggtcctgtttagtcacagagtgggctaggaaaattttgtcccagccccttaattttccagggtaagggttgattttctgtgagaagtatttaatgctattctttgctaaagagccgggtaaactctgaaaaattaaatccaaagctggttatttaaaaataactatgttcttaacactcttgcagacaaacctaaatatcagatagaaagtccttgtatcatttctatttgaaaattgaagattttattgcctcttttcttatgtactgcaccatcttacatcagaagaccagggcttgttttgacagggattattataattgcagcataatttgtattagacccatgtaacaagcctgtctacttcatggaaattgcagtgggttgcccagtcattccagttaatcagacactcatcgtgtgggaagcccagcattgagtttggtgctttgatgcacgtctgagacagtgtgatgtggttaagcataggaattgtgagcctctgagtggataaccttacctatctctcatttacaggtatgtgaaacaagaagttctgggtcctttcatcataagggagaagcttcagaaagttccgaggacctgctaaaatcagctactagaatctgctgccagaggggacaaagacgtgcactcaaccttctaccaggccactctcaggctcaccttaaaatcagcccttgatcccatttctgggcaatttagacagtgaaactgactttgtttacctgcttgcagcatattagaacagacgatccatgctaatattgtattttctcttaaaacatagctttcctgtaatttaaagtgcttttatgaaaatatttgtaattaattatatatagttggaaatagcagtaagctttcccattataatatatttttgtatacaaataaaatttgaactgaagtctg

SEQ ID NO: 1018 - DNA, 121 bp, Homo sapiens
attctcctgcttcagcctcccgagtagctggactacaggcgcccgccaccacgcccggctaattttttgtatttttagtagagacagagtttcaccatgttagccaggatggtctcaatct

SEQ ID NO: 1019 - DNA, 32127 bp, Homo sapiens
cggcccccagaagattgtgggtgtagtggccacagccttacaggcaggcaggggtggttggtgtcaacaggggggccaacagggtaccagagccaagaccctcggcctcctcccccgccgccttcctgcaggtaacagggagccctgcgctgcgcccccagtccttgcaggactgcgccgtgggggaaggggccgggcggggaggaggcggcgggcgcgcgccccgctcgcgggtctgcgctctggggcccgcgcgggagcgagctcggcgcggcgccggcggccggttgagctgtgctctcagcttcggagcagcctccccttgctgattgtggggcgccctgtaatctgcgcttcgcgggcggcccccgacgggtgaggcgcccgcggccagagctctccaaggcggccgcggagtcggtcctcgcagggaggtgtggaaggtgaggggccagcgaagcgagagcggcgcctcggcccttcagtgaccccgcggggtcgcggcaagcagggcgagggtgctcggctgggcgggtcactgtcccggggcggcagtgcccgagcccggggggatcctgggggcgcgcccgccctcgggaaggcggcctcattcttgatccaagaccagtgcccgtcccccaaggcccagctggctcctgtcttggcatagtgctttctgtttagaataaagatgaaacatttctcggaagagcatattcaggaatccatgtgaaattctcggagtcgggtctcgaattttgggggtcactgttaactgctgtttttagggacccatgttcttataaaatgtatcttgagctgaaatcacaattattttggtccataaagacttaattgtgtattgcttgtcagctagcaatgctggactgagttccgcagagggaatatatacctgaaacacgaaagcaagggccggagtaacgttaccgctggataccagaatatcagccagtacagtgcatccttaatactcagagtgcaagccattatctttggaactttcaagctaagggagctaggaccaaggtagtctcgagtaattgctgggaaaagaaaatatttggtagaaacatttccatagagcacacgggtttcttagttgagtgtatgagttgccctttgacctagacaagggttttcttaatctacaagcggtccagaaattttatgtgctgcccaagtaggcaaaagagtggagggagattattaaagggaagactgatgcatattcaagtcagagactgtcaactcagcattttattatagagtggagatgctaagtgctacgaaatacctattacgggatactaggatatccttttctaccttcttgtgactttttaatttcaaagctaatgagcaagattttgtgttttccccgtcctcaaaacaacaggaaagcattttggaaggccaagtgtttttcttacatttcaataaatcaattttagctgaattatcatttttaaagcactggcgggcatggtggcacatgcctgtaatctcagcaactagggaggctggggagggcaggtagcttgagcccaggaattccaggttacagtgagataggatagcgccaatgcactctaggccagcagcaacagaacaagaccatatctctatttaaaacaaaaaacaaacaaaaaaacttcttcatataacagtatttgtgcttctttagatatattagtgtgaagaattactgcttcaaaacattctcaaattgcaataatcagcacacctttttaattttcccccaataaagtttgcactgggaacatacaatataatcttaccactgtcagtattacactgatggtatcagtggacttctgtcaaagttaacatgctttcaaaacaagaaaatggcatcctttccagttctctcaagaaattgagtcatccctttttaatttttaagtgatttttttagtcttagacctaaaatacagtaagaaaaatgaattttaactacttcctaatgcttttataactttgttaattatagtggaattcatatgaaatctaaggttaatagctattgcaaggccaatgttcccacaaggaagtattttgctatttagaaatagctaagtaaattaaatgttcctttctcttgcctctggtgactgccattcatcagccagagcactgaccctgaatcctggtggcagtcttatctcccatgaggattaatattaacacttaaataaacagcatgatttcctgcgaagaagatattcattaatatacagtcccttattctctgcttttctcttaattgtgtgttgattttggaaagctgtgttttgtgggtgagagagagacggtcagactagcttcagatactttcaaagtaacacttctgtaactcactcttccagtctgactggcttttcaggcaggagttggagaccaagtagagctttctgcctatgaaatggcaattagtttcaaagaacatagacccattcaagttacctgaggaaaagggggctggttgtaagggtgtcaatgggatgttagggtatctgggtggaattagatttgaggctgggcttccggtagtcttgagatggatagtagtaatgtgccccctaagtatgactaagctacggtcccagtgtttgctttttaaaattttactaccaactgacttcctctggaaagtttctgacttcatgtggctttggtttgccgtagctccacctccacctcatagcatccttctaccttcggctatgcttctaataggcaaaaattgttcttagttcaaattcctgggggagacaatgatctggccagtttatctcttcactcaggccatgaaattgatggctaatttgtgaattaaccgccctttggcccaggataggtacctgccaacattaactgtgcccaagaagaggtggcaagatcaagtgctaagcataatcctccctactcagcaggaggttgtgacaatctggccagcactctatctccagaacagagggattagcattgttgcttttacccatggtcccacataaactttttatttgtagtcccagtagaaaggtgaatgttaccatagttgccatacttggcatttcttttagtactgttttttgcttctctgtcatttttaagaaagatacattgccaggtaggtaggaattcagtgaatttgttacaaagcagatttagttcttattctcagcaacatttttagattttgaaaatcttcaattttagatagctttagcctttatacatgtgtttcttatataacgatggttgtggatcggtaggcactttaaattttgttctaggcatgtgttttgagcagcattacatacccagtgtagaaggtgttgtatggaatttcaccgaagtggggaaaaattccaagtagagggtcaatgtgtaatgattattgagtttatatttgtccaaagaatacagattttaaacaaatttttaaaggcctacatagaattattggccgtatttgtagcagtttgctttctacattgccagagttagtaagaactctattttctaatttttatattatggtaaagccaccactgaaaactgactgccacagatttttcagacatacgttgtttggcctatataggtttagaaaacatttgattcaacattgaaaaatatggagatttccacaaaactattcaggctcttggttcctcacgataagtggcatgatctgacagttctgaaactgcagtcctggttggaactctgtgatagccactgtcttcagaatgcaagcctctcacagtaggtcccatgcacgcacagtaggtccctctgccaggctgccagtactgctggggcactgcacattacctgttgtcaccctgtgagtttgtatccctgttgtcaagaaagctgttcatattgtagaagatttggaaggtgcaggcaagtgtgtgtgtataaaattacctataatctgaccttccactggaaacctctgttaatacttcaacatatatttttcaagtctgtgtgtatgtatacatatatttcttttcaaaacaactttgaggcgtaattgatacagaataaatgaaaaaagtgtacagttttatgttttgacataatcacccgttaccatcatcatcatcaagataatgaatatatccatcctcccaaaagttcctcatacatcatgataatcctttcctctcccttgatccctctaactgtgccccttcactaggtgagcactgaagtattttgtcatagttgcatttgaattctgtgtatgtgtgggcttttgtttttttttagcaattgagattatttgagattcagttttgcggtttcccctttttacttaggatagctttgaagagtagtgcgatcgtactttttcttatgtttatcgtcatttgtgtttcttcaatgagttgtctgttttctttcccattattgtactggtgttttagtgttttacttggtttatatgagctcttcatttgttaatatgtttttcatcatattaacaatgtttttcaacatattaatattaaaaccatgattttcctcattataagtattctccaatttgtattgttttcctttataattttaagttattttctacatacagaagttttattgtttttgagtaatatttttacaacattttcctttgtgagtgaggatatacaagtgagttaggaagtatgaattaccttattctatttttgattgcctttccactctgaaagtttgtatgtggtggagtttggggagggacagtaactacctgtgactatttagtaatgtgcattttctctagagctgttagttgttaattaacaaccattgctggtaacttgcagagcgtttaccatttttactgtcaaatgtcctagttatgaggatcaaagaaactagtagtttggggtggctatgtctggatatctcttgttgatgttgcagatagggatttaatgtttgaaattgttttctgttttcttttagatctgcttggctttgaggaagagtggcagtactgcctcactgcataagggatgggatcagagaacagtgctttaaagagctatacactgagagaaccaccatttaccttaccctctggacttgctgtttatcccgctgtactgcaagatggcaaatttgcttcagtttttgtgtataagagagaaaatgaagacaaggttaataaagctgccaaggtaccataataggtgacgacttaatagttagtactttttactatcttgttttcttttaaaaaaatatgaaattagtaaagttcaaaggaggtaagatcataaggaccagtattttatttatgtcctttcaaaacattgctcttacttcatgggcctatcttccatttgcatgacatggtcaggtaccatacctgtagccaaaaaacatcataaaactcagtacaatggcttttatcatcatattttatttttctggtgagaaagttagggagacatttttatgtagctaatataagatataaggagctatataaggagttaatctcgtctagcaaaatgcagttaagtattgacatcattctggaggcttcagcttcctccttagggaaaagatccttgtagttcatgccttataattgttgctccaggcagagggtgccagtgcattagcatgctgtctgacacactcaggagatcctggcctcttatcagaaaaaatgattttactgtggaatgtaagtcaataaaataaccccaagtgtctttttgaattagggaaaatgaaggcattagttgatgcttctttggatagctagcactttggaaatttaggaattcagatatatcatcttctaaaatggaaaatgtaattgtattagtaaattaattctccagtgtttattctggtaggcatgctattttcaagttgaacttgatatcttgattttgttagaattataatctctattaccttgagtcccttagttatcaacaggtatggaacattgatgtctgtttcataggactctaaattgtttttatttttttaaaatgattataaaggattatattagtaatggaattttggtcttcacaacagtaatttatttgatgttgtatttttgatcaagcatgaaattgttataagatggttcctaaagaaaaagatgggtaacagttctctcgagatgcgtggtggtaaaaagtatatagctggctgttttcttgctaggtaattttgctttttggtagaaccacatttttgactctttttttacatcatctaggtattgttaagaattttttattgtgattttacaaaagacaaaatgccttacttcgctttcttgttcttacagttaatgtctaacatgcctcctgttattttcatctaataagattgtgcattttttttaataaactattatcggcgaggtactagagacttatctttcttagtatttttttctttataagatttttttaaaattgtgttacactttatggtgcacgtaccaagaaaattgaataacctagatcgagtttttaaaggaaaaaacagcaagaccactctccatttttgaggacttctgtgctgaaggaattgcgaagcttgagagggaagacttattcccccttaatattcatagatacccttttaagccatgtctgagtctttgcacatagttcatctttgtctcttgttaagccattctgtggctttgaaaacctcatatatgaatttgggaaatttgaaattgcaacaaagtgataactttagattctcagaatgtttctcataatcttaaaaaactaggtcatagcacttgagaaatgtatggcattcgatgtgctagattttaggaatttgatgtcctaggtatctgaaatactaaaacaatatatttagcttgcctcactttctctagagtttgggttgttggtcacacctttggtagttttaacgattatttcaagcagatatatagtgttttctgttactggataacaatatacactttcttcactgttacaagtaaaaaacaacaatcctagtatacaccaagatgaaatgcaggtataagctctggccacaaaataatgtgagaaatacttagttctatctgaccatctcattttacattgaattcatcagctataattaacagtataatttgctaactgatgatgatgactcatatatgtaagcctataaacagtgataaattctaagcccgaatttggttgctgtagtttgctgtaatctaagtgtttagttagggctttgtggtaagcttattaaagcttataaaaatgattcttgagtgtctttatgccaggaatcacattggactctaagagtggtatgtagatgctatataagtgctctatttagtattgttggagtcattatgctcttccccataatgaatttgggctgttgtggaagggttagtcaatgttatttaagaatgcacattgtgtgggcataacaagaaatggaagagatgatggctatgcccaaaagagcttgcattctaattggagaaagctgttctcctctctcatactgacttttttttttgagatgtagtctcactctgtttcccaggctagagtgcagtggttcgatcttggctcactgcaacctctgcctcccgggttgaagtgattctcctgcctcagcatcccacgtagctgggattacaggcacgcgccgacacacccagctcatttttgaatttttagtagaggtggggtttcaccatgttggccaggatagcctctacctctcgacctcgtgatccgccttcctcagcctctcaaagtgctgggattacaggcatgagccaccgtacctggcccatggttgactttttaagaaattattttttgcccttcataatcagaatccagtgctcttacgtggcttctgggcactatccactcagaagaacttcagaagtatcccccatgcctcaggtatgatggacccaccagatggaatggccagctacttgctccccaccacaccttgcagacttcacgctctcctttttccttggatgttaataaccatccaacctgccattctaaactaattatctgccaaaatctctagtctgagctccagatctatattttcacttacctattgaacatttccacctaaaagttttatcagtacctcaaatgcaagctctacagaatggaatttttattcctttctctttctgcattttattgttagtttatgatctaaccttcagatagtggacatttacaaaaaaaaaagcatctgcattttgtcttagatttacatcttcagagaaaaaggaataatatttttccctgaagatctttgttctctagtttaggcatcttggttattttgtttacttaacatatttaacagcgtgaaattatggctttgtctcatctaaaagcctgcaggtggatttgggctgtaatgctgagtcagttaactttgcatagttctcaaagtgaaatagcgaatcagaggcagaacaacaataaaaagttaagcctctgaggcttgaatgaattctctggatagctgaatcataactgattcctgataaaggggaatcatttatatttagggaaagaatctcatacttaagatccctgtttgggtgtagaaaaatatcatcattgataaattatataatactattcatatttaacaataaaggtccttactcagaaccctctttcagagaccatcacctaggacagtaaatgggatgtaataggtattcaataactttggggaaagtgctttcaagacactcattcaaaaatagtcatctttctctactagggcaagagccatttatttgctcaactgatgttcattgaaaaatatcctagttacccttagcaagtatgtcttgttgctattctttagagcagcagaggcttgaatcaaaaaatgtcctatttgattctgaactgctagcctttcctgtgaatctgtgtgcataatttatgcttaatattaaatgtaccaaaggagagtgagaaataaggttcttgctaagttaagtgccttgttcagaaacatgtaatgagtcatttcttcttctccttctttattaaacaaacaagtactcactttgcatcaagaaaatttctaggcattgtagagtaaaacaataagcagaagagaacatgaaagatttggtttgaaaattatttgaaatgattcttaaatgaaaatatgagggaggctacataattttatacagaaaccgtagctcaaaacacacctgtaggccaggcaaggtggctcatgcctataagtccagcactttgggaggccgaggtaggtggatcacctgaggtcaggagtttgagaccagcctggccaacatggtgaaaccccatctctactaaaaacacaaaaattagccaggcatggtggtgggcgcctgtaatcccagctattcgagaggttgaggcagacgaatcatttgaacctgggaggcgaaggttgcagtgagctgagaacacgccattgcactccagcctgggtaacaagagcgacactctgtctcaaaaacaaaacaaaacgaaataaaaaaacacttgtaaaaaattattcccagttaactgcactcatttaaccaacctgctaacacaatttttggtttatctggatctttgctgtatttattagtttgtaattgctagttaaagaaattttttcttcaatattttcttaattattttttattgaattaactcgagggtaacaactttcttcctaagaataaataaataaaccctattggagctattcccagagttggcaaaatttgagattattataagaaaataaaagaaattggaggctgggcacagtggctcacacctgtaatcccagcactttgggaagccgaggtgggtggatcacaaggtcaggagttcaagaccagcctggccaacatagtgaaaccccatctctactaaaaatacaaaaacaattagctgggtgtggtagcgggcgcctgtagtcccagctacttgggaggctgaggcaggagaattggttgaacctgggaggcggaggttgcagtgagccaagattgtgccactgcaatgcagcctgggtgacatagcgagactctgtctcaaaaaaaaaaaaaaaaaaaaaatgtaattggagaaaccaacccactgagaagattttcctatgaccctgcctggaagtagtttaataaagtttgaggcatctgatacaaaaattataccaatgcagggtatggattcttatgctagcccatagtcctccaagaaggtgttcagtattcactgcttatttatgaaaatgccacctggtaatatattgagggttatcttccaaatgaaatatttcatcactctcctcccaatctgattggacagggcttcctcagtgattgtatagggtagaccctagagctttaatatcatgttaggacctagaggacattatgttaagtcaggtgtccccaacccctaggctgcagactggtactggttcgtggcctctaggaacaggatggcacagcaggaggctgtgggcagtgggcacgcgagcattaccatctgagttctgtctcctgtcagatcagcagcagtattgtgtccggaattggtgggttcttggtctcactgacttcaagaatgaagccgcggaccctcgcggtgagtgttacagttcttaaaggtggcgtgtctggagtttgttccttctcatgttcggagtttcttccttctggtggggttcgtggtctcgctggctcaggagtgaagccgtggaccttcgcggtgagtgttacagctcataaaggcagtgtggacccaaagagtgagcagcaacaagatttattgcaaagagcgaaaggacaaagcttccacaatgtggaagcggacctgagagggttgccactgctggctgggcagcctgcttttattctcttatccggcccgacccacatcctgctgactggtagagcccagtggtctgttttgacagggcgctgatttgtgcgtttacaatccctgagctagacacaaaggttctccacctccccaccagattagctagatacagagtgtggacacaaaggttctccaagtccccaccagagtagctagatacagagtgtggattggtgcattcacaaaccttgagctagacacagggcgctgattggtgtgtttgcaaaccttgagctagatacagagtgctgactggtgtatttacagtccctgagctagacacaaaggttccccacgtccccaccagactcaggagcccagctggcttcacccagtggatcccgcactggggctgcaggtggagctgcctgccagtcccacgccatgtgcccgcactcctcagccctttgggtggtcgatgggactgggctccgtggagcagggggcggcgctggtcagggaggctggggtcgcacaggagcccagggaggggtgggaggctcaggcatggcatgctgcaggtcctgagccctgccccgtgggaaggcagctaaggcccggcgagaaaatgagtgcagcaccggtgggctggcactgctgggggacccagtacaccctccgcagccactgtcccaggtgctaagcacctcattgccccgggtggcagggcctgccggctgctccaagtggggggcctgccaagcccacgcccacccagaactccagctggcccacaagctgcgtgggcagccccagttcccgctcgcacctctcccttcacacctccctgcaagctgagggaaccggctccggccttggccagcccagaagggggctcccacagtgctgtggtgggctgaagggctcctcaagtgccgtcaaagtggaaacccaggtagaggaggcgccgagagcgagcgagggctgtgaggactgccagcacgctgtcacctctcagtattagattctcataggagcaggaaccctattgtgaactgtgtatgcaagagatctaggttgtgcacttatggcaatctaactaatgcctgatgatttgaggtagaacagtctcatcccgaaataatccccccacccctggtccatgaaaaaattgtgttcatgaaactggtccctggtgtcaaaaaggttggggaccgctgtgttaagtgatgtaaatgaggcacagaaagacacacaccacaagatctcactcatgtggaatctaaaaaagttgatctcataccagttgagagtagactggtggttaccagaggccaggaagggtaggggattgtaggggatgaagagaggttgattaatgggtacaaatatgcagttagaagatacaagatagaagatataagatctagtgtttgataggtcagtaggatgactagtttacagtaatcgattgtatatttttacataactagaagagactaattctaatgtttctagcataaagaaaagacaaatgtttaaggtgatggatatcccaattacattgatttgatctttacaaattttacgaaagtattaaaatcacaggtactcccccaaaatatgcatattatcaatttttttaatttaagaaaattaaaaataaatagggcaaaaaatagtctactgtggttaatattgtactatgtcacataaaacgtagaagccttgtaatgtaggtatcttcagcctcctatccctaccattctttgttacatattaattgtacattcattcacacacattgaaaacctcaccaggaagtattacaatatctgctttaaatagcgattaaataactgaagaggtaaatatgtggccttcacctgggcacggtggctcacgcctgtaatcccgacacttggggaggctgaggtgggcggattgcccgaggtcaggaattcgagagcagcctggccaacatggtgaaaccctgtctctactaaaaatacaaaaattacctgggcatggtggtgcaagcctgtagtcccagctactcgggaggctgaggcaggggaatcacttgaacccgggaggcggaggttgcagtcagctgagattgcgccactgcactccaacctaggagatagagtgagaccccgtctcaaaaaaaaaaaaaaaaagtggccttcatatttattgtaatatttactgtttctgatgctgttccatcattcctgaagatccaagtttccctttggtatcattttttcttccatttgaagaacttcatgagcattttttatatagcaggtcttctggcaagaaattttctgtttttttttttgtcaccaaaagtgcttttattttgccttttcctctgaaggttacttttgcttagatacagtattccaagctgatagttttttctttcagcattttaaacatgtttcattgtttcttgccctccacctttcctgatgagaagtctgcagttgtttaaatcatcattctcctccatgtaatgtgtttcctttagctgcttctaagatttttttatctttgatatttagcagtttgatggtaatatgtttaagtgtgctttttaaaaaatttatcttgttttatattcactgaaattcttcaagtctgtaaaatttaaatttggctaaatactttaagtattttcatccatttaaaaattttcatccattgtattttttatgccccaatttttttcttttctctttttgggacttcagttatatttatttgaccttttgttattgtcacaggtgtctgaggctctggtctcttttttttctttcttaatttttctttatgagatggagatttcactgtgttgcccaggctggtcttgaactcctgggctgaagtgatcctcctgcattggcctcccaaagtgctgggattacaggtgtgagtccccaaacctggcccctctgatcattttttaaaacattttttattcttcagattggttaatattttcaagtttactgactctgtattctgtcatattcattctgttaatgagtctatacattaatttttgattttcaatcttttatttttcttttggaaatttaaatttttctatttattttataacttttcctttatctctaggaggatgattacaatagctgctttaaattctttctggtaattctaatatctgaggccccttggagtggtgtttgttggttgtcttttccattgagaatgtgttacatttttgtggttctttgtatgttgagtagtttggggttgcatcctggacattttgaatacgatgtcacataactctttgctctgttataatcctttggaaaatgctgatgttttttatttagcaggcagctaatttaggttcaggcctcatgtttttgaactagttcctcttactcttcctgtgaatggtatttgcaacctgtctgtttctcaaaactttgctctgctggtttgggtctatccagtggatgcttgcttctgagaatttgtgggtatgtgaaaaatcaggacatctctccagctctctcctctctgggataccctcctcatactcaccttccttggttcttttctatcgttctttcagccagaaagatggtaaagtttttactggacttttagcacctttgttacactgctttgcaactggggcctgtcaccatgcatagctgtgagaaggggaaaatttccccaaaccaagaaacttaccccatgggtgtcgcttcttcaggtttgactcccctccataatctgtttgcatttgcttacttgtcaggatttcagttgtttctggcactttgttcagtttatagcagtaatcgttgagggatctgggctcttatgaggcttacactacaatgatggaactggaaatttctgtagagccatttaaatattagtaaattgaatgatgtcagaacaagtaatagatctttgccttatgtgaaatatagtgggtagggaggaaggtagggagctcaaaagagccttaactgcaagtatacattttctgatttcccccataatgtatatgaaactataatctggtttggggtcattaacttcagctcttcggtttgtatttttaaagcatttgaagacacttcgtcacccttgcttgctaagatttttatcttgtactgtggaagcggatggcattcatcttgtcactgagcgagtacagcccctggaagtggctttggaaacattgtcttctgcagaggtctgtgctgggatctatgacatattgctggctcttatcttccttcatgacagagtaagtaacctgtatagtctgcatcacagactttgatgtagatgggggtgggagggtgatgtgtgtggtaatacttataaattatggtgttcatagaaattgtaagttaagtgttattattagaaaacttcctgaggaaaaatagcatgttggaaggcacaagaggtgctatagatagaggttttatagaatggacaactagttctgtgtccctggacagttacttatagaattttattttagtttactatagtctgtctctagttttggataattctttgcctaaacatagctacagctggcatgagttactaaaacaaagaaaaggtgtaatgtcagtgctgccatagaccaaagttcctatttgttttcaggagttgtgtcccattttagattttgaagaaagaaatgaccatttcttaggaagaggcagaatacatacatatcctttcctttcccatttgagtagttggggccaattgagagacagcctcttaacattctgtggtgtaaccagtgtgcttggctctctgatgatatttgctattactagaagatggttcctaggtttacttctggtctgtttcttgacagtattactgttttcttaatggtatttgcattctgaggcattaaggtctttggcagtccaccaagattaaaaaatactagtcacaggttagaaacacttggacttgactcatctttatgtatgtttttaaatttttttcaattaattggagacagattctccaaatatcatgttggatttatagtctcttaaaagtgcatttacaagttcgcatgataacgagaattattagtggttcagtggggagaaatatcttctttgttgacaaaagtgcatacacatggttaaaaagtttgtacagtatgtgggtgaggtgtccctctcccatccttgaatccagtgccctaattcctctcttcagaggcaatggtggtaactcgtgtattattccagagatgttctttgtgcatataaaacaaatatctagtgtgtatacttcttctctttcatttttttctcaaatggagatatactatacacactattctaaaccttcctttaaaaaatatttatcttttggagtattctctataaaaatatttacacatttgatgtattgggtagaatatttaaagtgctcttttggccaggcgcagtggctcacacctgtaatcccagcactttgggaggccaaggcaagaggatcgcttgagcccaggagtttgagaccagcctgggcaacatggcaagaccctatctctacaaaaacatttcaaaaaatgagccagccatggtggcacatgcctgtagtccccctacaccggagactgaggtgggaggattgcttgagcccaggaggtcaaggctgcagtgagctgtgatcacaccactgtactccagctggggcaacagagaccctgtaataaatacatacattacatacatacataataactttaaacatacttttttatcactgaaatgatttttggtttggggaaaaaaacttaaatacctgaatcctgttcttattttctccctttcttttacttatttgactgtactatttttacagttttaaaatgggctcttttgtggtctgtgggatatttcttttttttttttttttttttttttttttttatttgagacaaggtctcactctgtcgcctaggctggagtgcagtggtgtgatctcggctcactgcaagctccacctcccgggttcacgccattctcctgtctcagcctcccgagtagctgggactacaggcgcccgccaccatgcccggctaatattttgtatttttcgtagagacgcggtttcaccgtgttaaccaggatggtctcgatctcctgacctcatgatctgcctgcctcgacctcccaaagtgctgggattacaggcgtgagccactgcacctggccagtctgtgggatatttctggtggtccttatcattccattttcctcttcttcaggcagaatttttttaatgcctactaacaagatttcagatgaagtagatctgggttcgtgatagaatgtgggtgagaaagaatttagagaagaaaataaataaaataacctatgtgagcaaagatatattttatctttaaaggcattggaagcaaataatatagattatacagacttgtaaatgtatgtttaagaacatgtatatcccctgactcccatagaaatcgggagatgactgtgtgcactggctttaatgtgtttattaacctgccacatgaggcagggggagataacagaagcccttccattccatttttctttttatctaacttcattcaatttgttgtttcttaaagttatagttccatttattatgccacaagtgggaaggcttgtcataatttttttggtgattagtatttagttttttaaaataaagattgtgagagatggagaaaaacatcttttgaagtaaatttctatttcagatcctggagtggcactcttccttctgttcttttttttttccagggacacctaacacacaataatgtctgtttatcatctgtgtttgtgagtgaagatggacactggaagctaggaggaatggaaactgtttgtaaagtttctcaggccacaccagaggtaagccaggggacagccccccttccttacttggtttttaatagcgtcttggtatgtggttcttgcctaggcactttccttcagtgttagcttggtcttagatttggagacttgaattttttgtcagtgccctcatttatagaattatagcattttgttcctcagaggcagtgggggtcatgtatcctttctccttattttataaatagggaaacctgagacggagagaggtaaaatgtttcgttcagatatttgagttaaatgcccctcctctctgccccatagtaccttgtacttacttggatcataccacttgatagtgaaattacctttatgtatctgtcttgtattccattggttgggctcttaagggtgtgagtctcttatctttatacctctacctagaatagtgcctggcacatactaggtattcagaaaatgttctttgaacaattgtccgagttgcccaatttcatacatggtatcttagtagcgggatttaggacctgtgcatcttaactcctagtggactgtgttgttgctgatgtagtattccttatacttttgtctgagagttctgcatgtttccctcccaggttgatgaacctttctgttttctgttttgtgtgttcttttcacattttgcgtgttgctgctgcattcactctttcttaaggaaaaaataaaaaccatttccatcttaatatccctacggaaatggtggctcactgttgacttactgtttcagcttaatttcccctattcttttttgtgctgcttccacacttaacttgggccatgtctaacgtgtaccttcatgggttcttgctcagttcagatgttctaccacaaagacatctttctggttattctgtccatattgatctctttcttccctgaatttaccttttgtgtactttgtatatagcatgtaatcctttctgtgctgtttattccaaattctttgccatgggatataaggcccttcacaatctttctgcagcctaccttcagcctcatttaccatttaggtttttctggggagtgctgggaaacggaatttctctctgtcacccaggctggagtgcagtggtgcgatctcggcttactgcaacctctgcctccctggttcaagtgatcttcccacctcagcctcctgagtagctgggaccacaggtgcacaccaccacacctggttaattttttatatttttggtagagatgggattttgctgtgttgccaaggctggtctcaaattcctgacctcaggttatctgcccaccttagcctcccaaagtgctgggattacagatatgagccaccgagcctggcctcactcaagagttcttgagctatagtctggttacatcttgttccatgcagttcagctgtgttcccacatatgccttcttccttcacactcttcttctttgtaggccattctgttgctggaatgcatttcttcccattggcttctggaaaatgtgaactcatctaagatctggctttaatctcctttctgtgactccttcccctaggcattcccctgcccaacaaaattagtcaccccagtgcttccagggcacttagcacgtttatggagattcttagtttacattctaggttatgagcacctgattgggggcagaaactttattgcattcatcttgtattcctagtgtcctaaatgatgttcgggacatataggctcttcaaaaatagtcttcgaaactagcaaattaatatgcttattctgtggatgttggttttgtctccataactaaggttctcaactttctaatctcgtgtggtagcaagacttaagattcatttggtttagtgagattaatgacagatttgttctgtgctagaaaagccttcttattgttaatatctaagcaggaaaagaaagaagtgttctaatttccatataaggaaatcagatgcacagatgcctctgaacagcagagcgtgtctgttaaaccagatgaaggggagaggaaaaggaactaccatttattactgtgccttgtgctgtgccaggtactttatttgcatttttaaaattagaagcattttaaatttgtgcatctaatatgcggcattgatttgaaggtttaattggtgctgtttgcattgctcattgcttatgtaacctgatgtaagagattagttcaccaaacatatgtatgaatcattttctttaatttatttctctgtctagtttctgaggagtattcagtcaataagagacccagcatctatccctcctgaagagatggtaagatgatatacttcacatataatgaaggtgcctttgtgtaattgagtatgaaattttaaaaaactttcctctgcttactcctttctttactgagttatagatgcctcataattcctctggccttaaagctttctaagattaatcttatcaccacagccagggagccagcttaaatttttttgtcacataaacacctatgatattgtttagaggtagagatacctcagtgtgaacagacaattatacccatttcacgataagtagttgtattagtctgttttcatgctgctgataaagacatacctgcgactgggcaatttacaaaagaaagaggtttattggactaacagttccatgtggctggggaggcctcacaatcatggcggaaggtgaaaggcacttctcacatggcagcagacaagagaagagagcttgtgcaggaaaattcccttttataaaaccatcaggtcttgtgagacctactcactattaccagaacagcacaggagagatctacctccataattcaatcacctcccactgaattcctgcccatgacacatgggaattgtgggagttacaatccaagatgagagtcacagccaaaccacatcattcctcccctggcccctccccagtctcatgtcctcacatttcaaaaccagtcatgtcttctcaacagtcccccaaagtcttcactcatttcagcattaactcaaaagtccatagtccaatgtctcatctgagatgaggcaagtcccttccacctatgagcctgtaaaatcagaagcaagttagttacttcctagatacaatgggggtacaggcattgggtaaatacggccattccaaatgggagaaattagctaaacaaaggggctacaggcaagtgtgaaatccagtgaggcagtcaaatcttaaagctccaaaatgatctcctttgattccgtgtctcgcatccgggtcacgctgatgcaagcggtgggttcccatggtcttgggcagcttctacccctgtggctctgcagggtacagtttccctcctggctgctttcacaggctggtcttgaatgtctgcagcttttccaggcacgtggtgcaagctgtcagtggatctaccattctgggatctggaggatgctggcctccttctcacagctccattaggcagtgctccagtaggaactctgtgtgggggcaccgacctcacatttccttttcacactgccctagtagaggttctccataagggccctgcccatgcagcaaattctgcctgggcatccaggcatttccatacatcttctgaaatctaggtggaggttcccaaaccccagttcttgactaatgtgcacttgcaggctcaacaccatgtgaagctgccaaggcttggggcttgcaccctctgaagccacatgctgagctctacgttggcccctttctgccatggctagagcggctgagatgcagggcaccaagtccctaggcttcacacagcatggggaccctgggcctcgcccatgaaaccactttttcctcctaggcctgcaggcctgtgatgggaggggctgccatgaagatctctgacatgccctggagacattttccccattttcttggggattaacatttggcccctcattacttatgcaaacttctgcagctgccttgaatgtcacctgagattttcttttctattgcattgtcaggctgcaaacttcccaagcttttatgctctgttttccttttaaaactgaatgcctttaacagcacccaagtcacctcttgaatgctctgctgcttagaaatttcttccgccagataccctaaatcctctcttaagttcaaagttccacagttctttagggcaggggcaaaatgccaccagtctctgctaaaacataacaagagtcacctttgccccagttcccaacaagttcctcatctccatctgagaccacctcagcctggaccttattgttcatatcactagcagcatttttgtcaaagccattcaacaagtctctaggaaattccaaactttcccacattttcctgtcttcttctgaaccctccaaactgttccagcctttgccagttacccagttccaaagtcccttccatattttcaggtatcttttcagcaacgccccactctactggtaccaatttactgtattactctgttttcacgctgctgatgaagacatacccaagactgggcaatttacaaaagttccacgtggctggggagttccttaaaatcatggcagaaggcaaaaggcacgtctcacctggtggcagacaagagaagagagcttatgcagggaaactccccttttttaaagccatcagatcttgtgaggcccattcactatcatgagaacagggcaggaaagacctgccccccataattcagtcacctgccactggttcttcccaggacacgtgggaattgtgggagttataattcaagatgagatttgggtgggaaaacagtgaaaccattatcagtagttgcactttgctggaatccataataattatggaagcaaaaaccctagtcctttcttgtatgtcacccaaaccattcatctatctctagctgcccattacttaggatttcaagatgcacagaagaatgattattaagagtgctggtaaagaaaaattctatttaccaataaattcaaaagcagatgctccttctataaatttgttcttatagccactataaataatccccaaagatatatttagtgtgctttacaggaaatatgaactcaactataaacttaagtatagacctaagacttgaaataaatcagatttatccaaatcagtattatgtatatatactagtgtttttaaaatcggtgatttgcgggttttaagtcaatttagggggtcctgactagcattttataaaaaaaaaaagaataaaagaacatgtctttgggcatcttagatagtaaggctaagcactgttttatgaaacttttgtttccattatgtgtgtatttatgcacgtgtatgtatagtagagcatgatataagacatattctttaccatggattgctgtgaaaatatttgtaaaagccaccgacatgtgccatattctaacctttttaaaaatttttgctcattttaatgttttacaatcttcaacaaattctattcactaatagtgttaagaatctatacattcatgtgtggtggtctgaagatagatttgagtataataaatacaaacatgggagaaggtgcttcagagaaaattagaaatggcttataaggcagatcctctagttttaattgtcttcactgcttttagtctccagaattcacaactctcccagagtgtcatggacatgcccgggatgccttttcatttggaacattggtggaaagtttgctcacaatcttaaatgaacagggtgagttggagttatactactgcatctatagaataagtaggaaaatcatccatgacgtattctgtgtggaattcaaaggactacagtctttgagcacagtaaggaatcttttgcttaccaggtaacttttttagggcagatactaagaacagtaaggaaagaagctttgggtttcattagtttgcatggtgaaaagaattttaagtaggaagcactttgaactatggctgtcagtatcatgtgtgattaccttattaattggtaatagtacttaagcggtctaaatgtagactctattccttattgaaccggccaataagtacataactatcattaatgatttatatgtaataatctgaataatagggtaaaattcataattttttgttaaattgagctcaacatttctttattctttcaaagctcatttgatttattttcctattaatttactcttcacttttttctttcattgcctcttaaagctcaggctgctaaagacattgttttctcctctcttctgtgttctctaactgcatgcttggcagcctgcttcactctcctgtgcccactttaggactttaattttccactcattgagtttactgaggcatgtgtcacagtaggccccttattggcctacatctcacatggctcaagctttgtgccagttctaatgcggtttattctgccaggcttatgcagtgttctgattcagctgtcagctctaaattgtcccatcctaaatacttgagaattaaatcctaaggcccaaaggcatccattgtgtataatgaactaactattctatgtatttagaatggtagcaattatttactatccttggaagaattgtaaatataatcattcatataactgttctgtggatgaggaacccctgttgagaaagaccctcaaacctatcactgttagcccttcttctttgggcctgagctgggttaaatggataatcaggaaatgagagggtatagaagggaatggcacctggggtggggtttgatggtggtggcaggacaactttctacacctgccaatgagttttgcctaaggcaagcaggaagctgtttagcaacagccagggctttgtttgtttgggcttttacaggttggtttttgctctcggcagtctccagctatagaggtcctgaaaagagggagaaggcattggaaactaactgtagctctggatttcagtttcagcggatgttctctccagctttcaacagaccttgcactcaactttgctgaatcccattccaaaatgtcggccagcgctctgcaccttactatctcatgacttcttcaggtgagggcatctggtgtggtgacgccagctgcttccggaacactgctgcctgctcttgtgccttggataagtggcagtggggggtttttggaggaccaaatgatgcagtttctgttgttaattattaggagagattgaatcatgtccacaggagaaaatagaggaagaaattgggttgtctgtcagtttcctattatagataggaagttttagaaatccttgattgtcttgaaggcttggatttagaaactgtagccagatttattagggcttctaatagtgaagaagctaggtgtgtccactggtttacagttgtaagttaattgaaaaagttactaaacctagcctttcttttctgctgccattatattatgagtttattattattcagtttttctcatggggatggggaatgagttcatattctttgtctagtaatatgtgatggaagagcaaataagttggtttagaggcaagggcacaatataatttaataccttattagattcagagatatttttgaacccttcttcaaggttagttttaattatgtgtccttcatttttttatttccatgactgcagaacttctgcacaggttagttccatattcatgacttctattagcaaagccaaccttatgttagttttaaaactaaaaatcctatgtgtttgcatttagagcttgagaaaaaccagagcaaagggaaggctagtattattcccaagtggggaaaattacctctaggatagaactaggggtaggtggggaagggtaatcttattaaataagtagcatttatggttactgggcttatattgtcatatttcaaactattcaaaactttcccattatgatcgtcttttttgaggatgtttttaaaaatttgtatttttaattgacaaatacaaattttatatttatcattatgagagtctttccaaagtacttctatgcccttttggatgattcttagaaatattttatttcccttgatagaaagtctctacaaagaacaatcccttatggtaaatagattctctcatcactctgtgtaaaatgagttatttattaagagttgtattgtaaattgagaggggagaggaaaactgaaaacacacaaaccgtacctgccaaaatcccactgttaatgtggggagaaaccccagttaagagacaacagtaggagccagggtcagcatctcttacagaggcagctgaaccaatttgattgattagatttaagtttagacatctttgctgctgaaccagggggaagcctaaagtaggtataaacataagatgtgaagatccaagtggtatctctgcttactgggcctcccaataggctgtccagcttgtatgccggagcatctggggtcaacagtctcatatacagtagggtgtgagctgagcagtgcacagcctttggaattctctggcagccctgtaggaaaccgaccactcctctcacactaatccctgcctggctgaaagaatgaccaagtaacttacagcaggagaaatgagaagattgctgtatggaaattccactttccacaatctctttaatagtttttatttcatcaaaggagacttgagagtcagcaatattttgtaatggtaatgtcatttctcccaggatacttcatttaacatcctattacaaccaacagtttggaggatttttctgactaaaccataaagcatgttagcatatgtgtgtttaaacttgtatcctcgtcacagatctctttgctattaaaatattagatttcagaggcgtgttccatagtatttgtctcataagctacttagttgtaatagaatctttaaatggcaaaggagaatgtttcttggttgaaaattatattgatgtagtctgtgattatgacctcaatatttaacattctctaatctgttctgctgaattccttctctttttggcatttagaaatgattttctggaagttgtgaatttcttgaaaagtttaacattgaagagtgaagaggagaaaacggaattctttaagtaagttcagaaaattaagaatttaaattgaataacttggattaagtccatataatcactttaggtattctagagaagatgagtcatatatttggtttatttcacatttattgaacatttcctatgtgtcaggctttctgctaggccctggtggggtagatatttctggtgaaagaaatagatacccagactgataatccttaaacagagaggtgggtacagtagagcttttggaaggagtcctgagaacacacagggcaggaggaggtcgttagagaaaaggtattctaggcagaggggcaacatgaacaaatgcacaaagacaagacctagtgtgacttgtgcaggaaccgcaaacagttgagtcctgctgggggacaaattccaagacaaggacaggtaggaggtacaccttgcatgtggcagtgaggagtgctgatgttatttgtaaataggggacttcaggcattgaagccatcaaagagatggaagcaggctgtgaaacagattaatgtccctttaggtggatcactttgttctctattgagtgggaaggcttaactcatttaagatttggattggttagtgactatggtagtccaggcagtaaatatgaagccacacataagggcattaatgtctccaatgaagaagacactaagataaacatttaaaaagataaagctgagaagccttagtgattatcaccaaatgaaatagagaatattggaggagaggacctaatatgcagggaaaattatgacttcagtgttggatatgttggtttgaagtatctgttggactttagatagagatatacatggaccgttgaacagacaggtctgaagcttcagagaagtcttaagctgatgagctagagggaaatattagggtgttatcagcctatagttggtgatattttcacagagaaagtgggtagcatgaaaaggacagtgagcccaaattgtaatcctggggcacccgaccttataagggggctggtgggaaggagtggctgatgaatgagaagcaggggttagaggagactcagagagctaggaaggctatgatattcccaaaggagtagggaatttcacgaaggtaggaggaacgaacaggtacctgttcatttagtagttaggaagacactggtaactttatcttagcaagagctgttccagcagtgagagtgcattgggctgagaagtgaacagaaggtgagaaagacactggagaaaaacttggagagaaaatattactgaagaagcaaatggggtcaaggaaggattttgtaagggtggaagagacctgagcatattaatagacgagggaaaggagctagcagaagaatggagggagcagttgaagctgcaatcaagttggggagatggttggtgcattgtcctggaagagaggggaatgctggggcagtggctggatgggggtggccttaagtaagaggaggccctcggatccttaataactagaagggaggtgggaatgagtatcaatgtaaacctgtttgctgatagcggtgtaggggtttgaaggtgataatgcatgtgacctgtttcctaataaagtaggaggcaaggatatctgctaagggtgattgtataatggagtaatattaccattaatacctaatatctgtatttcttaacaaagtgcctttatatatgttgttttaatttatggggatagtgacaaaagcctatgttttgttagttatggaagctttctacattgtttaaatttgagaaagtgtcttttattatctacaaagcctgtcttcttagggtaaaaaggagggcactttgactattagtaaggggataatttggtggaaacatttcctggtgtgaattggaggtgtgctgactagctggctttgctcacactttctgtatttttttttttttttttgagacagaatctcaccctgtcacccaggctggagtgcagtgacatgatctcagctcactgcaacctctgcctcccagcttcaagcgattgaacctcagcctcccatgcctcagccccgagtagctgggattacaggcgtctgccaccacgcccggctaatttttgtacttttagtagagatggggtttcaccatgttggccaagctggtctcaaactcctgacctcaagtgatctgcccgccgcggccgcccaaagtgctgggattacaggtgtgagccactgcacccagccacgcatttttcttaagtacttggggaccaatctgttcaccttctctatctccatttcaaatgcatcactttgatagaagtgagagagaggatgtgtgtaggctaaactgtacaagtaagctgatacagtgtcatgaccagtttcctgggctttccctttttgtcctcagatttctgctggacagagtcagctgcttgtcagaggaattgatagcttcaaggttggtgcctcttctgcttaatcagttggtgtttgcagagccagtggctgttaagagttttcttccttatctgcttggccccaaaaaaggtgaatgctttttcaaagtgttattgctagttaagaagtttggtgattattagtccatatttgagcaggatgagattactgtgtggtgtagttaatgtttggttctaaaaacggagaacaattgttggcccctgatgtgataactttaattcaaacctgggtaccagagttcacaggataaatgaagcatcttcctagagagtccaatttactatagtaagtgttatatctgactagaatctgaaatatacatttgaagttttaaggtaaggcatgcatcttcaaagaacttttacatttatcatgaatcatttaggcctgtgcctcctaccttaccaagagcaacccatttattttctattttcagtgaaaagcactgagatcattttacttcctggggcttcaagttttttttacgaatgtgaaatgaggttattgctttggaattttacaattttatagcactagagatggtaacaacagatgagagaatatagtattaatatgacactagaattttaagttacgtagaatcctgctttcagaatttattttcttaaagggatctcagtccaacaaagcattgttacagtttagaatttccttatatctctactttgataccattctctttagccatgaatttttctttatagctcttacatcctattcctcagtaggtcttacataggggtgtgcctctgaatcacctatgttgctttttgaaaatttgcctctttgcttgatccattggttctagaacagagagccaggacataggtatacatattttttaaaagttcccaaataattctcaatacatacctgcctgataaccactaccataaatactggaaaaagaggagtatccagcatcaaagtcccactgtagcatttaacacctggttttgcaaataaaactacaacaatatcagtatgtcacaaatctagtgtatgaaattcctcactgattaaacataaatttataaaaagttactcagaattctgttaaaatacaagctttgttgtacactatgatctctagtatttcaaaaactctacaaggtaagtgtacttaacataattaagcgttaagtaattttcggtcaagaaaagaactttgctttggtttggagcattagaatttagaagaatactggccgggcgcggtggctcacgcctgtaatcccagcactttgggacaccgaggcaggtggatcactaggtcagaagtttgagaccagcctggccaacatggtgaaaccccatctctactaaaaatacaaaaattagccgggcatggtggcgggtgcctgtaatcccagctactcgggaggctgaggcaggagaattgcttgaacctgggaggaggaggttgcagtgagccgagatcgcgccactgcactccagcatgggtgacagagtgagactccatctcaaaaagaaaaaaagaatttagaagagtacttagaatatgtgtagttttgggttcagtgtatgaattatgcttaatacttttcactgaaatgaaaatttgttttttcatctgtaacctttgatttttcgggtagatcatgcgcagggagaaactccttgcttgctctcaccagccctgttccagtcacgggtgatccccgtgcttctccagttgtttgaagttcatgaagagcatgtgcggatggtgctgctgtctcacatcgaggcctacgtggagcacttcactcaggagcagctgaagaaagtcatcttgccacaggtcagaggccaagtttgcagtggggtagtcacagaacctgagggaagagtgctgaaagaaagagttttggaggtattcagataatagcttagaaagccttcaggcagcagtctgtggaatacaaagtgctgaaattaaaattgcatttccattccattcacacaggcaaattgattaaactgacatatttggtcttaacctgggagaaactataattgtttgttaattttgggagggtaaatgaataacaataatgtatggagcactttgtgaacataacatataattatccataattattataaagtaattaaattagaacagagaggagcatgagatgattcttatcagtggctttcagcctgttgttatcagccactagggaaccttattatgatttgcccaccaaagggttttgttagtgaaactaatgaaaggtttgtattagttgcttaggctgccataacaaattatcacaaattataatggcttaaagcaatacaaatttatttttagttctggaggccagaagtctaaaaccagggtgtcaacaggaccctgcttcctctgaaggctgtaggatgtgaaagggactcctctttacaagcttctcgtagctcccagcaatccttggtatttcttggcttgtggctgtatcattccagtctctgcttctgttgtcacgtggccttcttacctccttgtctgtctttacatggcctcttagaaagacaccagtcattgaatttatggcctaccctaacccagtatgacctcatctaaaggtcacattctgcatggacatgaattttggagggaca

SEQ ID NO: 1020 - DNA, 648 bp, Homo sapiens
aagcactgatctcaggagcagtttagggagggtcagaatcttgtggcctccagctgcatgactcccaaaccataatttctaatcttgtggctaatgttggtagtctagaccccaggcaagaaggaggttggttttgggaaagggcttttattgtttttgttttaaactgtaaattataaactaatttccttccaaagttagttcagcctatgcccaggaatgaacaaggatagcatggaggttaaggacaagatggagttggttaaattggatctctttaactgccttagtcataattttgcaaaggcagtttcattgctacctgaatgattttcctaacttatccatcaatctcctggaagcctttctccttaaccaatgtcttcaactctgccagacatgtggcagcttcttcatcagcagatgtggcctctccagttatttttatgtttttcagtccaaacctattcctgaatctgtgtagccatcccttacttgcagtaaatagcttggtgtgcctaatttcaggggatccctttcttaagtcttcctataggctcaacactttctggcaaaacttactgcggtcagctgaaatacgttttctgttcatgtctcccacccacaaatgtaatgccttttccgtct

SEQ ID NO: 1021 - DNA, 544 bp, Homo sapiens
cccatccccagtagatcttaaattaattctttattgtctgtattcatgagcagaaagtaggaaatgtgttcttcagtcccaggcgtttcccttctcttcatcacggtattgttccttccaggttccactcaacttagtaattttgtgagtttctgtatacaaatgtaaaattggggttgttggagcctttcaaatttctcaacctaatgattaagtttaactagcctccggccgggcacagtggctcgtgcctgtaatcccagcactttggaaggctgaggcgggcagatcacgaggtcaggaggtcaggagatcgagacagtcctggctaacacacggtgaaaccttggctctactaaaaatacaaaaagattagcggggcgtggtggtgggtgcctgtagtcccagctaatttggaggctgaggcaggatagtgctgtgaacccgggaggcggagcttgcagtgagccgagatcgcgccactgcactccagcctgggcaacagagcgagactccatctcaaaaaaaaaaaaaaaaggtttaa

SEQ ID NO: 1022 - DNA, 1892 bp, Homo sapiens
aatttaactcaattctgacactatctacccaggtatagcatagaccccacaggttaagagctcagtcccacaagactgtccccctcttgagatgctagtcccaagttccaggttgtgacttacacttctgaccagctggctataaatcaaggattcccacatcttctaatctttgatcatttgctagaatagctcacagaacttcaagaaacacttaacatttactggtttgctataaaggatgttacaagaggtaaaagacgaacagccagatggaagaaatgcatagggaaaggtatgtgggaagggatgcagagcttctgtgctctctttaggagcatcaccttccactacctccaaatgttcagcaccctggaagctctaggaacattgcatttcagtgatttttatggaagcttcatcatataggtgtgatatttactaggtcaatctccacgacctccccacttctcagaggttggtggatggggctgaaagttcacattatggcttggtctttcttttgaccaccttccattcaggaacccaccaaaactcaccttgttggaacaaaagatgctcctaccacctaggaaattccaagggaatcagagctctgtgtcaggaaccaaggtcaaagacaaatatgagaacaaaagatgcacctggcaccctgatcactcaggaaattacaagagttttaggagctctgtgcctagaactggggttggaggccaaagggttgaagaccaaaatatatattattataaaccacaatatcagagtttgtcaacataataaaccacttgccatttgttggacctatacaactgtacaggagtaagtccacaccaaatcaacctaatttttatttataaatatgactagaacaccaacagcaacagagaaaactcaagaaaagaaagcaactagaagatgtaaaaatattatagctcaggatgtacttcattcttgaagccaaatcagtttgatataaaaattgagtcattcagaggaccacagagtttgtgcaaattgaaagtatgattgttgacttttgttaaacagaaaggccaaacattaggatagctagagttaataagtattttggaaagtaaagctaaagacataccttttaagatatgagataaagtgggcaaatatgagaaaaaagataagagacatggagagagcaaaagttccaacttctgtttaataaagaagcaaacaaaaatagagggaagatgtattcacagacataatacaggaaaattttcctgtgttaaacaaaaaccagccttcagatagataggggcaactgactgtcaacaggaaaacaaaaacagagattgacctggatacttgctgtataattcgaaagttgaaagagaaccttttcagaaagataaactggtaatctgcgggagaatgaaaactggatcgttttctcattggcaaactgagggctagaaggcagtggatcagggccattaaagatctgatggaagttaatagccaagctaatattaaaagtaagacactttgggtatctagggactgaaaattatttcagtggaatataataggtatctagaaatagatcccagaatttcagaaaatgtaatatgaaaaaaatggttcaatcagtaagaagaaggtgaattatttaatttttggtgctggcatatgtagaagaaaataaaattgggcccacatcttagactgcttacaaaagtaaattctatcagaatcaagagattaaataccaaaaaaaaaaaaaaatgtaaatctttcaagaaaaatctagtaggctgcatgtaaaatctaggagttgaggtcactatcttaatcaaaacttaattagctcaaaagctgtaggagacagatggatt

SEQ ID NO: 1023 - DNA, 806 bp, Homo sapiens
tagctctgcatcaatggataccgttacatcttcttcctcttctagcctttcagtgctaccttcatctctttcagtttttcaaaatcccacagatgtggcacggagcaaccccaagtcaccacaaaaacctatcgttagagtcttcctgcccaacaaacagaggacagtggtgagtcagttttaatatcaccattttgctgtttctttgtatttttcagacagatcagttgttgaaaattaatatattattacttcatactcagaggtcatgcaaatagaggcatccatgtcatacaggaatgaaaaatatgtaattatttggtggcaaagtctatattccttaactgaaataaatggtattgtctctagtgttggatttgacatttaaacctgtctgccaaacttgaaccacagtcatgtctaagcactagtttaaaataaatcaggattttaagacttgagcttgttcattatctaatgtgtgtcaggtaagactcattcttcacccttgagaaatctcctttctgagttatattatcagatgttgaacgttcagtgtgattgatatgtttcccctcatctacttcatttttggttgttgaatattagtattaaccattggaacagcgtaccctgtaagtaacatttgaagcatttaaagagaaatctgtggaattattgtgggtggtctataatccttaagtgcaacgaatattgttagtagacttaataagtaacccatctgtatacatcactactttttaaatgtctgtggttacttttgacaataaaaattccaaatacaa

SEQ ID NO: 1024 - DNA, 10126 bp, Homo sapiens
acgcagccgggacggtagctgcggtgcggaccggaggagccatcttgtctcgtcgccggggagtcaggcccctaaatcgaagaagccctggcgcgccctccccccctcccgggtctggtagggcgaaggaacgggcgtgcggtcgatcgagcgatcggttggcggctctttctcctgctctggcatccagctcttggggcgcaggcccggccgccgcggcgcgcgcccggtggccgttggcgctcgcgccgcgtctttcttctcgtacgcagaactcgggcggcggcctatgcgtttgcgattcgacgaggagtcgtccgggtggtcggcggcggcgggcagctgctccgccccgctccgggggaggcggcggcggcagcggccgcgggatttggagcggccggggaggcgggggtggccggggccggcttggaggcctggcgccacccttcggggcctgcaaggacccagttgggggggcaggagggggccggaggatggttggttgtgggatttctactttgccttttcctccttatgccgccttagtgaggggcgggagctctggcggcagccccggggtggggagacgagctccggagtcggaagagctgggttttcttccgggcctagccaccagttggcggagtgaccttaggcgagtcactctgtaatttgtctgcgcctcagtttcctcctctgcctatcaatgtgtgtggggttgaaatcgctttgtaaactataaagcgtgggtgtacgtaaaggatggttattgtttataattttttttgagttgtaagaaaacttagcagttccccaatccttgggttttgaacctgggaaccttggattggagttggggatccccaaacttcctgaaattgtgggaatgtgcggtttgggggaatgatgggaatttgtgggaatgtgcgttttaggggaatgatgatccatcgctagcaagttttccaagggggctgtgacccagaagagttaagaatcacaatttcttcatgctacagagaggaaactgaggcctagatgtcatttgggacccttcacaaccattttgaagccctgtttgagtccctgggatatgtgagctgtttctatgcataatggatattcggggttaacaacagtcccctgcttggcttctattctgaatccttttctttcaccatggggtgcctgaagggtggctgatgcatatggtacaatggcacccagtgtaaagcagctacaattaggagtggatgtgttctgtagcatcctatttaaataagcctattttatcctttggcccgtcaactctgttatctgctgcttgtactggtgcctgtacttttctgactctcattgaccatattccacgaccatggttgtcatccattacttgatcctactttacatgtctaggctgtgtggttggtggtgaataggcttctttttacatggtgctgccagcccagctaattaatggtgcacgtggacttttagcaagcgggctcactggaagagactgaacctggcatggaattcctgaagatgtttggggtttttttctttcttaatcgaaagttaacattgtctgaaaagttttgttagaactactgcggaacctcaaaatcagtagatttggaagtgattcaaagctaaactttttccttggccctccttgtgttctaattgcttgcaagtgtaatactaggatgtccaagatgccagtttttgcttctttgttagttgtcagctgcttttatcaaatttcaggccattatccaacaaacactataaaaatgtttgaacaattggatttcaaacattttcgttttgtggagtggtgctcaccaagtggtacagccctaagcaagtgaacacaaacacatttaagtgtattttgtctgattagatgttagccagttatgctatttcattcaaatgtctgaaaaaatcaattgactattcccttttcctaaagggcagagacagataatctcacttccagagaaatgacttggagaaaaaaaagtgttggtctttttgctcttttgtaattaaatccggatgtacctcaaaagacttaagactgtggtgataagatgctttcctcagcagaaaggagggaaaaaaaacaactggaactcaaagcttgaaattctgtggcaaaacatgagatgtccaggattggaggttgaaaagatttcactacagtgttctgcaatagttggagcagataactttcagtgtagccacagccatggactccagatttccagattttcaagacctggacctggaacccgaaagagcttgtcacgatgcggcaggaacactggaggtagatttttttttatttttgaattttgggactgttgaccttgctgtgagaaaagagacaacgactgagcaagcactaccaccagcactgttactgggaattagaagacctgagtttctgtccagaccctcagtgcaaactgaggatgctccatccaaagtgaattatggtacttgccattttccaaaatgccttatcctttaccatctctgcacttttgttcatactctcattctactttggaactgctgctctgtggcttttcatctgtcaaaactgccattttctcagtatccaactcttatgccctcttttccatgagtctcctaactagccagaatagagctttaaagttttatgacatttcgttatgtatcctctatctgtatacaaaatcctgtaaaatagttacttgcctgcatttactgtctttgcagatagcagactccttgaaagcagggtccttgtttagtgcatctttgcccacatacaccacaacatatcaagatgcatttattaggaaggaggagtttagagagcaggctatcagaataaccactcagtaagtgttttcttaattgctatgtgataacttacattactcttaatgaggagaaaagtcgctagatatggatcatgtttatgttttaatgttttttaattctaaattttgatctagggagccctcagacataaggagaaaccaatatgttgaatgatggggtattacatacagaaggaccaagaccttattttctcctacttaagatggaatcttgttaagatgaaaggacagctttttaaaaggagaaggtcataagacagtttgaggaaggcattggaagaggaagaggggcaatgtctcctttgttttattgttggtatataaacttaaaatctcagttctttttatggcacttgtggagccacttcctctcctcaccaaaaaatgcccagtaccctgaatccgatcaaattactctcctaaagtataaggcttagtttctgtgtgctgcttcgcgagacagttcccacaaatcgagagtgttaatcagacttttgtgttttcttttttggattgctgttgtttgttttcatttatcatttgtctttgcctaagccaggctcatcaagaattaacagccatcaggctgccgatgtgctgacagcagacccacttagagtcctgtgtttgtaattccatgcatttgttattttacctgttttgtccctgccccttctagtcctgtgcctcctgattgctgagtgttcacctggaccttctgactaccttccctgtgctattccatcagcctacagacctggtacctggatttttgcccgagatgattcctaccaccttactactgacgaagacacccattccagtggaccactgtgacccaggaggcattcagccatcatgatgtggcctttacctccactcctgtcttgttctacccagattcagcacagccctttatagtgaagtcagagtcctcaagccaaatagctaaagctgttttatcacaacaaaggcctagtttgttccatgagtgtgcatttcatttcttcagttaaagccttcagagacacacaataaatttggaccaggggattttttagttattaatgctctctgaagaaaggcaacatctttttgagagcagcattggaccacaccccacaatctcaaatgattgaaattcatgaacatctaggatcccgtgaaggtcactggaccctgttttttctacttcaaatcctgtagtagcctactgaatgagaaaacatattctgacccattgggatcaaatcaaaggcacagtgaactcctcatagcatcttctttggaattactcaggaaccagaactttttacacaaatgtaagaaattctaccaaggagtccccttacctaacagcatctcacaaggctgcaccagattccagaaaaggcttctcttgatacatcaaggtagaacctctatggtaaatccctctgtttataatgcactttacagtttcaaagcacttgtacgtacatttatctcaattatcaaaataacagtgaattataatccctttttggaaatgagggaatgtaaattttaaaagttaagcaattatccaaggtgacacagctgtgaaagtggtagaggccaggctttctgacacccagtccagtactctccttggaattagcctccattttacccacagtgttaaaatggctgggtattgggaacctcaggaaattttccagcttcctgatctggtgcccctagtcacataggatgtgtgatcacgtgatagctacatctggaccagaatcccatggcaatatcccacggtttaagggcataatatctccgtggtggtagattgtcaagtcaaaaacgggacatgttctaacagcaaagctacccaatatgaaacacaaagctacttttagattttttaagacttactgatattcctgggccctaagagcttgtctatggtcctatctttgcaaactagtatttacacaaaatgagccacctggtttttttaaagtcagtattgtgtgtgtgtgtgtaaatatgacatggagaaagcttctgttacctagtaagatagtaaagtatgtaagacatggcccttcccccagtctacattgaggtatagtgtattaaaggatctcaggagacttgcagcaaattactactgcttctgtgcttaaattcagaagtctgaaaaaaaaaaaaaaagacttctagtaaagagttccattttgctgtttaaccctttgtgtcctaagtttaatcaaacacagaaggatatttttttgcatcattccatctaatggaatgcagaaactgctctagagcagtataaccagtgcttcctgattgccagcagattgccctggacaccccagaataaacagcatcttcaaaatccccctttctcataccttcttattaatggttgaattagtatgtctctgtcatctgagagtcttgcatcttgaccattacctttattttctgtcaagggaatccctagaagatgtatggggagacataggaaaggaatggaagaaagttaattcaccccaaattggataaattccatgacatttagcaatatacttctgtatccctagaattgtatcataactttagttcaaggacattgcatctcaggtgggttaaggaggttgggaaggggagaaaagggatgaggagatattttcttgagatttatctccttgagataatgcttgagaagtcatccagccatggacttcttggagtaatacttacaaagaattggatgcattttgcatccttaggcaaaaaccccagtgctgttacaactgaaaatcattagccttgttctctgatagatacttacaagcccaactgcaggcaatcaaaatttatagcagatgagttctaactccatcaacctgtaatgtggtccatcttagggaaagaataggaaaacaccttggtttaccacaggctttgcttacagtttctgctttctgtgacctattttttgtatttcagcattttgtgaccgacttattcttagatcattggttttccaaaggctttgtggccatgaagccctttgagtgaaaactgtgcagaagcccagagtaaaagtgaagctgctctggatgaagtagtgaagcaagagtaggggcctgaatcctgctacaactatcttcctttaccaccgtggtgacacctaaggggacttccttacaacaccttgaactcttccgaacacagtttgaaaaccactgccccagacagcaatatgtttgacctgaatggcattccaatcttttctgtacctccactcagcacagttcatgttcagtagatgctgaacattcttagaaatactgtgtgtgaacttagaaaagtgcaagaagacaggcatgtctttgaccccaggaatgatcatttgctgaagatggtgtcaagtgaacctagattaacagccctccactccagatggatatccagtgattcctagaatgggatatagccagagaacaattctatgcaccctacactgacagactcccttaagcaacaccagatgctctactggtacttgaagtacatgactttgaagtcttgaccctccatgaatacctgaattatcagcaagcgggttttgaagctggtgcctcattgaggccatattagagcaacttgtacatttgacctcttgttatcagccatggtactctacttcgtgtgcaagagataactatgaaagccaaattcaaatactggcaacatttcctaaaggggctcaatatctatcattcgtcttcttttccaaactacacatcactgtatgactcaaccagtagcagttatattgccccttggtttttattcagtttaactactgtttccaagataaatgagctaataagctttaaaaaaaaaaaaaaaaaaggctgaattcttttttcttcatcactggcatatctgcctattctccagaattattatgactattcagctcactttaacagttgaacttcaagcgacaatctttgaacaccccttctcatgtgatttaaaatgaaaccatttggaaaagtttcttctagccagtaatagattttttttttaattgctctgccttgtgccgagagatgttcttttaagatgaatcttttgatgtctgataccaccaaatataggtggtagggagagttggaggctggccctttgagcaggccattagcttacttgctgggcatttccgatagcttattgcctacctttttgctggaaacaaactgatttgaaaaacaaaatctatgaagactgcagctaaggattttatcggtagacttaagagcttttgtccttgtggatattttagtggaaccacatcagtctcaatactgtcattttacactgactcagagcagctgacttcattccttgccatgatatatatttaaggcaggcattgtaacagacataaagacaacttatctgtttcagcaggaaggattcagtttatgaactctcagaccagatcatgttgaacaaggagactttgatgtgtgtcatgagaaaactcattctttacttcccagtcaatttaaaggccagctatcctgagctactcgaatgaatgcactggttaaacattggaaatagtttgtttatatccttgtctctctctaggccaattgtgattacatgactcgactctacatctcgtcaaacaaggcctaggtctggttgctgtagactgctcgccctcaacaaataaaatctggttgactagcctccttgtatatacaactattatttgttaagaagaaattatcgtcaattttctactaccttccaattgtcagctctttttttcctctctggtttttcctatactttacagaaaaagacattgatctatactgccattccctctaatcctgccatactcagtcaaaaggaatgacttaagatgaagatgatcatctgctcgagtctaaaatatacattgtatataagaattggtgattagaaaagcaaaaaacctaaaacttaaatctaggagtctgtatactgtctccatgtctccatgcctcagatctcatctaaatctttgaacagcaccattcaaccaatctgaggccttgacttgcttgtaagatgattctcagagatcggctgagttaaaaaagatgacgacttgattaccaaagaaagtagggccaactttgacaaatctggctctgctgaccctgtcactcccagatgtagcatagactcctaaacagaacctcaagtctgattgaggataaggccttctcctgagctgaaagttctttggcagatgagcaagaaactgaaagctgatgtacctgactggctctgtaagatcagaaaactgtatccagaataagccctatggattaacccctgagtacccagagtaaaaactaatttacagaacttccttattgatctgctggttcttccagatcatattctggctattggtatggctggcctttctgaaggtaccctgcttgtctattttcctgactcagctcttgcctgcctttttcacatgttgctgcaattagactcaccgtgaggactacagtcaatttcagtctatcttgtgcccaatacaacaaggatttttaatagtaacaacccacacctcacccactaggactcaatgttcacaacaggaaggaccattgctgcatactccttgaccagcaacttttttgaagatatttttaagtgcagagtaggcctctattcctgtatgtaattgttcattttcagcacctggaacctcatctatcgggtctggaaggaatacagcagttcgaaagccgcgtccatttctctccttcagtagtgcagaaatgagtccgattcaccagtacacacagaactgtaccagttcaacctagcaaaagaagaaaagtttccactgtacttaaaatttacagctgactcaaattgcctcacagaattatttgatgtagaaggctagttgtcttacttcagatcagcaggacagttgggctctcagactcatgaccactgagtttgcttgtgttgaaactgtggtttcatccaacatatgctattggacatgattattattccattcaaatggattacagacttcttgaggacaggacaaacttatctctcatggtgtttttttagaatacttttataaccaaggaagaaaccatgccagctgttaccattcaacttcttaagcagagattaagctttttcatatctgttcttatcctggacatcagtagtttttaattgcccagcatccgttccatcttgtaacaactccctgatgtttcttaaaaccacctcttcctattttcagtctgtggtttggacagtctgacccaaccttgagctttgtgggtgaacatgtaattcagacctcatcaatcagcaaatccatctgaactgtggaggagaagctctctttactgagggtgctttagctttgtaggatgaaaacctcaaactaacagggcctaccatgtagagaatgaagccagtgcaggggaaagcagagccaaaatatggagagacttgaatcctgatgacagcgtttgtgcccctggatccaaccgtgcctgaagctagaatatcccctggacttttcagttatgtgaaccaataaatacccttttttgcttaagttactttgagttgggtttctgttacttgaaattgaatccacactaatatatctaccaacattgagacttgacagatccaagtatttattaagctagaggtcatggtcactgaaattactttccaaagtggaagacaaaatgaaacaggaactgagggaatatttaagatcccacagaagcgtaaaaatgacatggtagaaagtaatagaaaacctaaatgtctgtcattaaaggataggttaaggtgtggttcagccatataggaatatctcgtatctgttaaaatgaataaagtacattcattgtgtatggaaaaatggccatgatacattaggtgaaacaagttattaatagaaaagtgtacagtgtgaactcattttaaaatgtgtgtgcttatgtttataaatgcatagaaaggtctattcacagctttctttgaacagtgtagatcacatgaaactttcaactttatacatttctgtattaatattttacactacccacattatttttaaactttattttaaataaagaatttttaaaattaaa

SEQ ID NO: 1025 - DNA, 195 bp, Homo sapiens
tctcaatgatttatgatgtaatattttggaaggaactatgtcataaatctgtagctttaaggagcttttagcattaagttgcgatagctcaattcagacaatctgagtctcgtgtggatggtcctgaaggagatggtccttgagtgggtggtttatgactgctccatcttcatgttcttccagccttttttggtt

SEQ ID NO: 1026 - DNA, 611 bp, Homo sapiens
cctgctttgcttgagaaatgctttaattgggtgtcattagtaatcctgtcaagggtaaaaaaaacctcccttgttaggaatcaaagcaaaaagctctctctgaggagtaatgaggaatatactctttctaatatgatgcggaagcacttaatatttgttattggtgtttacagaaatgattacttctcaaacattgctgcttacagaaatgattaattctcaaactatgccgggaaggtgagtatggtaatgattttacaagggaggaatctgaagtgtaagaggaatcatgtcttgccccaggtctcgagctaatctgtggcaggtttcggggcggtgcctgctcctccgagcctgtcctgggaactggccacactgccctgggttcacagcaccatgggctctgtgcgtgccgttcacatactcttctcccttgacagctttgcacgtcaaggagaagctaccagcccacgcttcttggcaagactcctttcctcttggttgtaaggatgatacggtctgcttcggagatgataaaactagtattgatgtttatttatttgcttttacttggcagattctcagcgctgattttgagatgatgggcttgg

SEQ ID NO: 1027 - DNA, 368 bp, Homo sapiens
atgaatgtcagaataatttctctttcacagtactttatacaaattatctccttttgtgcacaaaccctacaaggctgggacttgactttcctcatttcacagggggtcagactgaggcaccaagaggttgaggtggagcagggattccaacctgcatgggcttagccgtggcaccccagcacgtctgtgctctgtcctgttctcacacttaccctcctgggcttgtactccctgtgtctcagcttccacgggagttcctgttctctgggcagatgaggtctgcttgtctggagttggagaactgaatctgttttcagaaattgtatctgctaaagagttgttaagtgctttgttagcagcgaagaaga

SEQ ID NO: 1028 - DNA, 247 bp, Homo sapiens
tacaatgcagcagttgcacagatacggtccctaaagtgagaaatgaatgttcgaaagaaggtgctctcgtttggcatggagtgaatgccttgtttccacctcaaatcctaagatggaacacatttttcctggtgacttcaggcagatggcacacctcccacttccgttgtgtgtcatgaaggaggagacacttctatagccagggctgtgcctgaataatgatgtacatgggggggagttcacattc

SEQ ID NO: 1029 - DNA, 548 bp, Homo sapiens
gtgaaataatgctgacaaaacttctaacaagaagcactactcctgcccctgattctccccagaccagtttccagagacagtgaatcatttggactatttgagctgtttctttgattttgcctccaatttttaaatattaatttttaatgctttttcttgatttcgcctgtttcagaaattatcttttgacttcctgttttggaagttggacgtgtagctcttgccccctccacccacctaactcactacttttcctctccccttcattccaaaagacctgtttcacaatagtcagtgattatcatgtaaatgatgtttaccactgagccaagaaatgtataatattatgatgagttttttttgtttgttttgttttattttttgagacagggtcttgctctgtcacccagactagagtacagtggtgcagtcatggctcacttcatccttgacctccttggatcaaacaaccctcctgcttcaggctcctgagtagctagggctacaggcctgtgccagcacacctggctaattaaaaaaaaaaaaaa

SEQ ID NO: 1030 - DNA, 32192 bp, Homo sapiens
taaggctaaggttcttataaaaattacctacatcacagaactcagcatcctgggcactgttggtgtctttttcatgcccgccaccgtagcaccctggcaacaggacaaggctttgaatgaaaaccttcaggtttgtacgcataagatttgaagaagcattttggcagcagtggagggggagtggtggagggctgtggaggaatttatgcctggggagaaaaacatgtaaaataatcttttaggcataaagttaattttactgacatgcatttagatacattatgtgtataaaatgaaaagaataaaagttacagatatgatcaataagcatatttttattctgcttaatcactcaaaaaatgttatatctgtagtgcaagttcatcatgaagaactagataagcatagagaatacaaataagccaaaataagaaaattaaaaccatcctttatcccattgcccagagttaatggttaatacttcggtatatccctccaaacttcctactttgtatgtacagcacatgtataaaatgtgtgtgtgtgtgtgtgtgcgtgtgtgtgtgtgtatacacacagacatatgtagagtttaaaatctctgtcaaaatggtgagttgtattttagaagttcctgtcattccatgagcaaactttctgtgtttcactgcttgaaagtgaaaccagctgtcttgctgacagttgtggccttgccaagattacattcactttagtctcattgtgaaacttaatatatgcttagttatacaaatgtatttttcttttaacaggatacagtagagaagatttgtataaaagaaataggaacaaagcaaaggttagtacctaaaatataaaacctgtcaattcaatggatattggttttctggtttaaatttccatttagaattgtttgaaataatttcagatagaaatttaagatcgtagactaagacaactttctcttcatttttgctagcttctctttgactatgtctattgagatgccgtatgtgattgaattcattttcagtgatacacatgaactgaaacaaaaggttagtgcatctttgatttcttaagagctgttattttaacactacttttatcttatcaaagcaatgtatgcacgtggttgaaaagtgaaataatgctgacaaaacttctaacaagaagcactactcctgcccctgattctccccagaccagtttccagagacagtgaatcatttggactatttgagctgtttctttgattttgcctccaatttttaaatattaatttttaatgctttttcttgatttcgcctgtttcagaaattatcttttgacttcctgttttggaagttggacgtgtagctcttgccccctccacccacctaactcactacttttcctctccccttcattccaaaagacctgtttcacaatagtcagtgattatcatgtaaatgatgtttaccactgagccaagaaatgtataatattatgatgagttttttttgtttgttttgttttattttttgagacagggtcttgctctgtcacccagactagagtacagtggtgcagtcatggctcacttcatccttgacctcattggatcaaacaaccctcctgcttcaggctcctgagtagctagggctacaggcctgtgccagcacacctggctaattaaaaaaaaaaaaaacttggctgagtgcggtgctcatgcctgtaatcccagcactttgggaggctgaggtgggtggatcacgaggtcaggagatcgagaccatcctggctaacatggtgaaacctcgtctccactaaaaatacaaaaaattagccgggtgtggtggtgggcacctgtggtcccagctactcgggaggctgaggcaggagaatggcgtgaacccaggaggcggagcttgcagtgagctgagattgcgccactgcactccagcctgggcgtcagagcgagactccatctcaaaaaaaaaaaaaaaaaattgtagagacagggtctcaccatgttgcccaggcttttctcaaactcttgggttcaagggatcctttttgctctggcttcccgaagtgctagaatgacaggtgtgagctaccacacccagcctattttcctttttagaattctgcaggaacttcagaccttctctttatctctggtattctgaaatttcataacagtatgattttcattcattgtatgtaactggtggtctttagttctgagaaattttattgtattaaaaaaaagttcctctcttgtgcctttctgcagtgcctttctttttttcttttttcttttttttttttttttttttttttttgagacagagtcttactctgtttcccaggttggagtgcagtggtgggatcatggcccactgcaaactccacctcctgggttcaaacgattctcatgcctcagcctcctgagtagctggaactacaggtgcctgccaccacgcccagctaaattttctatttttagtagagacggggtttcccatgttggccaggctggtctcaaactcctgacctcaggtgatctgcctgccttggcctcccaaagtgttgggattacaggcgtgagccactacatagtggtggaggagtcctcagtagcaacaagagagtgccaggcccgttgcatggacacttttcacgcccctgcttgtatctcatctgccaacatatcattggccacagcaagtcctttggccaactccagtttcaagggtggaaatatagctgctgcctcgtggcaggaggaacttcaaaagtcacattgcaaaggggcacgcagacaggagtggagagactttgtggtcatgtgacactctagcacatgcctttgcctttgttgttgtaaagcttatttacattttcaacagcttttttatattcatgaaaatataatatacaaataagttatgattctaagatttctgttgaattttctattttagtcttctcggttttaattatctgatgtgccgtctgctatacccagataagtctaactgaatgggtagatctataatctttggatccagggtttgagactgtctcacacttatttgaccgtgtgaatcaaccttaggattgcagaagggtgactgatatgctcatggtcttctaaaacctacattttgttattttgttttttttgttttgttttgttttgtttttgttttgagacagagtttccctgttgttacccaggctggagtgcagtggcgcgatcttggctcactgcaacctttacctcctgggttcaagcgattctcctgcctcagcctcctgactagctgggagtacaggtgcccaccattacgcccagctaattttttgtatttttagtagagacagggtttcaccatgttggccaggctggcctcaaactccacccacctcggcgtctcaaagtgctgagattacaggtgtgagccactgcacccggcctacatttcattattttggaatttaccactactttgttgattcttaatagagttatgtaagctatgcaagggtttgctccatgacaggtaagtgcagactgctaatatggtgttactccattactcaccttgttgtcgcggtgtttgttttgcagcgcacagactgcaaagctgtcattagcaccatggaaggcagctccttagacagcagtggattttctctccacatcggtttgtctgctgcctatctcccaagaatgtgggttgaaaaacatccagaaaaagaaagcgaggtatactcctttttacttagacataggagacactattgaaaaaatgtttcagaataagctggttaaacttgcaaattattgattgtcctgaaaaactagcattacaaaatgaactctcacatctcaagattctgcaactaaaaatatttatgatatcaagcatgccaaacttctgacgtttcatccaaaacccttatgtggatgatttgcctgtacaaattcgcatttttaccttaagctccacaaaagaacatgtgccatcagacattacattgggtattctctataacttgttatagttttaaaatactgatactggaaaaacaaataagcagttatttgtggttggtaataagatcattttgtgtggctgtgacaaagagtctcttcttaagttaaaataaaaatagaaacttaggctgggtgtggtggctcacacctgtaatcccagcactttgagaggccaaggcagatggattgcttgagctcaggagtttgaaaccagcctgggaaacatagtgagacctcgtctctgtaaaaaattaagaaaaaaaattagccaggtgtggtcatgcacacctgtggtttcagcttctcaggaggctaagacagggcgatcacttgagtccaggaggttgaggttgaactgagctgtgatcgtgccactgcataccagcctggacaacagagggagaccctgtctcaaaaaaaaaaaaaaaaaaaaaggaaacttacatgatagtagttaaatattggttaattaatagaacaaaaggtatgtgtgtgtattttagtaatcacaatggcatgtatattcctcttagaatagtgtgatatatatatatatatatatatatatttgttccataatgttgatgctatatgatttttcagatactaattcttgacctctcagaagtttatgtcagaagttggaaactcccagttctaacattctacttttgactggaactcctagtaggccatcttgttgttaattacatcttattctttctgtttttatagcattagtttacctcactagaaagttttggagttttctaagtagaccttttgcagttgaagtgacaagaagctccagtccagcaccttctttctcctttcaggcttgcatgcttgtctttcaacccgatctcgatgtcgacctccctgacctagccagtgagagcgaagtgattatttgtcttgactgctccagttccatggagggtgtgacattcttgcaagccaagcaaatcgccttgcatgcgctgtccttggtgggtgagaagcagaaagtaaatattatccagttcggcacaggtgagtgcgctttggccctggtcctgcgtgtgcttcccctacatgtgaatcacattctgtagagctgacaactgtgggtacccgaccctgcctgtgtggtgaggggcagcctagtatgaaattgaagaacaagagctctggagctggaccccctaggtcccggttccagctgtaccactcacaggttctgtgtgtcaccttgggcgcactacttgaacttctggtgcctccgtttcctcatctgcgatctgaggataattgtccctaactcacagtgttgctgtgaggaggattgagctaatgtatgtaaaggatttttaaactgtgcctgttcacagtaagtgagatataaatgctactgttgtcattagcaactgaaccaaatacaaaacccttggtctgttgagtaggaggtcccaagtctaaggacaaaacatttgccctcagcgcagtcatagaaaatctataaggaatggtctcaggaagtatcgggccagcactgctagaagggaggtagtaccaccctccagatggggcccagggacgtctcagccaccagaaggcagcacctcagggatgagaggtgcgtggagtggagtgaggggacagtcttatcctattgattctcatcctctgtgcaatccagcagaagacccagccccttttccccagaggtacagtctgctgttgctgggacagaggtcggataagcatggggagtgcaaagggcgtgagcagagactggccttccaggggccaagctgctcaggccattgcaatgccctgcacatttgcacaagtgatctgcatgtgcacatggaatttgactcaacattttgcatagtaaagcaccacggtttgaatgctctatgatgtatcatttagaaaaatagtgtggtgaattttttttttttttttttgagacagagtctcgctttgttgcccaggctggagtgcggtggtgcgatctcagctcactgcaacctctgcctcccggccttagcctccccagtggctgagattacagtgctcaccaccacacccagctaatttttgtatttttagcagagacagggtttcaccctgttgaccagagctggtcttgaactcctgacctcaggtgatacacccacctcggcctcccaaagtgctgggattacaggcatgagccaccgtgcctggcctgtggacaatcttttgtatgttaaaattatcaaacagttttctaaaaagaaaggtacacacataaatatataatatcctttacaacagccgtgatggtatgaaataacattattgtttgttagtgctcaagcaagtgaacgtgtggaagcagcacctcatgctgatcttattacacaggttacaaggagctattttcgtatcctaagcatatcacaagcaataccatggcagcagagttcatcatggtgagtgcaagaggcttcctgtatctcctgggtcttttcctaccatgctttaaggggacctccagggcttaggccactcaagccaccatcagagcacccctactcctgtggtttttgtatattggtgggctctttatttcattaattaaaatgataactcattaaggaaaaattggaaattaaaaagaatagaaaaaaaaaatcacccatgtcccaacaccctaatgcaactagcattaacagctttgagaagttttcttctgtcctttgttttttttctcttaaaatgcagccagctttatctaaaagggttgaggtttaaaaaaaaaaaagaaagaaagaaaaaagaaatgctgggtgtggtgtctcacacctgtaatctcagcactttgggaggccagggcgggtggatcacctgaggtcaggaattcgagaccaacctggccaacatggtgaaaccccatctctacttaaaatacaaaaaattagccaggcgtagtgacggacacctgtaatcccagccacttggaaggctgaggcaggagaatcgcttgaacccaggaggtagaagttgcagtgagccgagattgtgccactgcactccagcctgggcaatggagcgagactccatctcaaagaaaaaaaaaataaataaaatgaaataataataaaattgagcaagctgagactgaccagctgcctcagccaggctggcaaatccagggctgattggatgggacatttcttcctgtagatgtcatagtcctctggaaactgtaaaaaatcaaataagcgtgaggtgataatattatagttactgtgtgacatgaaataaactaaaaggacataagtttagttgtttcacaaattagggaaagaaaatattttcggtgtcaccatatccctacactgtccttagatgtgtcaatgatgacagcaaatggtgactgcatccaacaaggagaacataatctttcacttcatttcctccagtctgccacacctaccatggggaacacagacttctggaaaacactccgatatcttagcttattgtaccctgctcgagggtcacggaacatcctcctggtgtctgatgggcacctccaggatgagagcctgacattacagctcgtgaagaggagccgcccgcacaccaggttattcgcctgcggtatcgggtgagtctcagagagctggtcacatagtccagacccacggggaggtcgtcttgttgccctgcaggggactttggcaagcttggaagttgacactagaatacagaagccttacagcatagagggatggggctccgggctcccagccagactgcctgagtctcagaacctgggttggccactcattagcttagccgtgaccttgagcaagttccttaacctctcatctgtaaaaccaaggtgataatgaaaatacctacctcctaggattgctgaggaataaatgagctcatacatagaaagcactcagaacagaactgaaccaaaagcaccaaatcagttagatgttattatttagcataagaatccaaatctccgcttgtcccgaagggcctgggtaaacctcctcactggctgtgctggactcgtgctgggggcatgtgacctccaggcagaccccgccaggctgctttgctccttcgcatctcttttctggccattatgagcacttgcattttcaaaccctgtggtgtgcatagaagctttccatgagaggctaacacccctacattgttggaattgccccttccccattaaaagttagttcttttggatggcactaaggtatgcggtgtatgtgtaaggaaaacatcgaacagagggggccacttggtgtctgcataggacttgcccatcctgcctgcctctgtggcccctggactcctacctgtggccaccacctcagcaagtggtcaccagctatctggtggcagtgcatggagcagatcctcagcttcttcatggggcagaatgggggcctctttgctgtccttgcccctgagccttgacctggactcgccctgagctccaggagccagcacccccaatgcccctctgtggccccgatgcccctccatggcccccagtgtccctctgtggcctccgacacccctagctgctatactcaagccagctctgcctgccttgagggctttcttctctttgtcctccactgtcacagctcctggctctgttctctgtaatctaaggcctagcccagcatcacaggccaatgaagaaatatatccagcctgagcagctccaccaggagttgttcctgatgggacttcacctgctgagctcacagctgcgctcagggcagcctgtgcaccgtctcctggtctcagcagcccctccctgccccctgctcccaggtcagggctcagacaccacagggcagaggtactggcacctattcatgccttcctcagtgagggcctattctgggacgaacatcgggccccgactctggggctgggagatgggattttcccatgtgccagggaggaaatcaagggagtgtgatgaggtcaggctcagaggctcactcctgtggtcccagcactttgggaggccaaagcaggaggatcgctccagcccaggaggtcaaggctgtagtgagccatggtcaggcagttgcactccagcttgagtgactgagcaagaccccatctttaaaaataaaaaaaaaattgaaaaatgtaaggcatgtgacggggagtctgggtgtgcagtgggggagcctgctccaagaggagactctgccagttagcaccgcccatgcctggagggggtggtatccattctgcttttctgtcgagttttgggatctttctaagtgttctcctcatcttccagcatgtgtttgcaattacaaactctagtaaagtgagcttcccaggggtagagaccatcagccctcctccttggcgtgagtcctggtcctctgagagccgccctgaaggagcacaggaagactccagcctgcctcgctaacagacagaagctgtaactaccaataacccatgttagggatcttctagtcaatgttatgatcatcaccaattaatatggagggtaaagacaaatccatctttatccataggttgaaaaacatcttggaaattattttcataagctctttttctgaaaaataattgatgttttctttaatatttcaggaggaattcctctaagcaaggagttcttgatagttgtagaattattgtagagagaaaagtaatagggcacttgtcatttaaatgtcagagatgctctttgctagagtgagagttgcttctttatgccttttgctatgttgatgtgtatcagatttcaagaggtagactttattcactctttgccagctctaggcctttgggatcagattcaggtaatattgttatttatggaaattaagttgatatctttgtcagcattctgataccttatagggttgtttttagagtcatctactccctccctcaggaactgaaagtcaagaatttcaacttttttctatttgaaggataagtcagtcctctgatagatgggagcttaaattagccaaactttcagatgtttccttctattatcactttctctgtttaacctcagcgacacacgagtacattcttccccacgtcatgtctctcctattgagttgtgagctttctcaacactgttaacatgtacttcaaaaatatttctaatgtcttcaaaattaaaacatgtgaaatgtgatcagttctacagcaaatcgtcacgtcttaaggattttgtcccagtgtggtgccggagtatttgaatattttaatgcaaaatccaagcatagttggagaaaacaggtatgttttttaaacatctggttttatatttatgtttggaaatctcttattcttccgagactaagaaataggaatatctgtgtttccttgaatgagaggggagccgtaaagaggcaagcactgccgcaggtgtgagccctgcctcaggactgcaccagcgggaacacaggtgttcttcatcaggtcattctcccagcttatggtttgatttctgccttaaaaatcatggactgattttttttaaagtgaattattaaatatgttttgctgaaattgtttccttattatgataaaatttagcattttaattttttttttttttttttttttgagacagagtcttgctctgtcgcccaggctggagtgcagtggcgccatctcggctcactgcaagctctgcctcccgggttcacgccattcttctgcctcagcctcccaactagctggtactacaggcaccagccaccatgcctggctaattgtttgtatttttagtagagatggggtttcactgtgttagccaggatggtcttgatctcctgacctcatgatctgcccaccttggcctcccaaagtgctgggattacaggcgtgagccaccgcgcctggccattttaaccatttttaggtgtacaatttagtggtattagctacattcacaatgctgtgcaaccatcaccatcttcaaactgtttcatcagcccaaacagaaactacgtactcattaagcagtaactccacattccctcctacacccagcgcctgctaaccatgactctactttctgtctttatgactttgccttttctgagtatctcatataagtggagtcataggacattgtccctttatgtctggcttatttcacttagcatgatgtttttaatgtccatctatgttgaagcatgtgtcagaatttcccttctttttaaagctaaataatattccattgcatggatggaccacgttttgcttatccattcatctatcggtggacacttgggttgtttctgtcctttggctattgtgaataatgctgctatgagcattggtatacaagtgtctgtttgagtctgctttcaattctggatatatgtgcagcgtgggattgctggatcatatgctcattttatgtttagtttttttgggaattgccatgctgtcttccatagcagctgcatcattttacattcccaccaccagtgcaccaggattccagtttttccacatcctcaccaacactcatcattcttttttttttccttattgattgaaatcaatcagcttttctttggtttgttttggtttttgagacacagtgttgctcggtcatctaggctggagtacagtggtacaatcatagctcaccacagcctcaactttctgagcccaagcaatcctcccacctcagcctccagagtagctgggactacaggcatatgccaccactttttttcttattgttttttgtttgtttggttggtttttgtttgtcgttggtgttttttgagacagagtatcactttttcacccaggctggaattcagtggtgcaagcttggctcactgcagccctgacatcctggtctcaagccatcttcctccctcatcccccaagtaggtgggacaacaggcccacaccaccacacccacaccaccacacccagctaattttctgtagagacagtgtttcgccatgggcctaggctggtctcgaatcccaagctcaagcaatctgcctgccttggcctcccaaagtgctgggattacaggcatgagccactctgcccagccaccacttgttttttaataacagccatcccactgggtgtgaaatgggatctcaccgtggttctgatttgcacttccctaatgactaatgacatcaagcatctttgcatgcacttgctggcttttgtgtatcttctttggagaaatatctattcaagtactggaatctactcataccaaggctgcatattagtaattagctaaaggcataatttcaggatgctttgtaaatgaaaaggatatgatcatgctattatttaaaattctagctgggcgtggtggctcatgcctataaccccagcactttgggaggctgaggcagatggctcacctgaggtcaggagttcgagaccagcctgggcaacatggtgaaaccccatctctactaaaaatacaaaaattagctgggtgtggtggtgtacgcctgtagtcccagctacttgggaggctgaggcaggaaaatcacttgaacctgggagggggaggttgcagtcagccaagattgtgccactgcactcccgcctgggcgacagagcaaaactccatctcaaaataaaataaataaaataaaataaaattctgtttaaactattttcgggaaagtaccctgtagcaggaaggagagaaaataccagagttataaaattcccaaaggatagaatgtatactttattttaaatgtgaagtaactattttctggatggagcattgaaagagaaataattcctcttttataaatagatagaagaccaaatgaccaggctatgttctccgagttgccactctgtctccgtcaaatggcagcaactcaatccagatgtgcccgaggccctgcaggccccagcccaggtgccgtccttgtttctcaatgatcgactccttgtctatggattcattcctcactgcacacaggtaagaagacgcagagtttgttattctatgggaagaccaatatattttgctaattttttttctgtcttcttccctccccttctcaccagcagattttcttcttctgggaacacagctggtggttagccagggctttggggaggcttctagtttttattgaaaggggagagaaaatcaccaaaagaatttctgttaaaccaagacactgcagagtggaaaggctaatgaggaatttatttttttccccatttcaggcaactctgtgtgcactaattcaagagaaagaatttcgtacaatggtgtcgactactgagcttcagaagacaactggaactgtaagattcaaaacctaaactatcaacccattgtttgaaagttatgattttatatttccatatataatgctctatgtcaagcttgtccaacccacggcccagggcagctttgaatgcagcccaatacaaattcgtaaactttcttaaaacattatgaaattttttttcaagtttttgttttcagctcatcggctatcgttagtgttagtgtattttatgtgtcacacaagacagttcttcctcttccactgtggcccagggaagccaaaagattggatacccctgctgtctgtactttgttgttttcctgtgttgaaatttcattacacaatatggagatggactatatgtacaaatgagtatactttccttcagtttctaatgcagcacttcttcatctggggtagtttggtctaggtatgtctatatgggcatcagtgggtggcaataactgcaattaagtatggcatttatgcatggaaattttgctagagaggttctcaaagatgttcataactcaataaaggtacatgccactggcctactgatgctatttagaaatactagttataataatactggactaagagtagatcatatcgtatattgaggatgtgggtttatttccttttttgattaaaagcaaatgaattatgaaagaaaaaattcctgtttcccaaatacaccatttctggtttccagatatgtgtttttcccaaccaattctctgacaccagttgcatgtcctacaatttaattcaattctgacactggccgcctggggttggcacagacctcacagagttgagggctcagtcccacaagactgattccaactccagacaccggtagcaagtagcaggtccccaggttacccacacttctggtcagctccaagtcagtgttcccacaaccctttctcacagaaatttctcaaatttcttacagtaatttgctgtaacagctcacagaactcaggaaaagtttaccttagtattactgatttattgtaaagaatattataaaggatacgaatgaacagccagatgaagaggtatacagggtaaggcccagaatagtcccaagcacaggagcttctgtctaacatacagttggggtgcaccatcctcctggcacatgagtgctgacccagaagctccctgaacccctttaggtggggtttttaatgcaggtttcattacaaaggcctggttgattaaatcattggccattggtgattaactctcccctctctggaggttggggagtggggttgaagtcccagccctctaatcatatggttggttccccagcaaccagccctcattctagggactttctaaaagtcacctcattaacataaactcaggtgtggttgaagggtcctgttaggaataacaaatacatacatttcttatgtctgtagggaagttcagactttccctctgaagtttccatgtttggtctataaaataatccaacgatagattaacaggggaagagacatgcagatgtcgttacgtgtgcacgagccacgtgagactcaaagaagggccagatgagtgaagtttcataccgtacagaggcgggtaggattgtggggctcctgggggaggtggggacaggttgtgggagggtgaggggaagaaacacgtggtgagcaaaggctttcttgtgatgcagatgaagtctggcaggcagcagccctgagagaatagaagcacctctggtaacggtttctctatcatccctttaaagtatcagactttagcctcctcttcctgggagttcatctttcctaaatctggataaggcagataagggggtctcagagaaagcctgtttgcatctgctgtttccttcactgacatacgattcctctgcagatgcaaatattccctgcaaaaggactgcttttcagagctactcctatgtctgctgtccctctgaatagcatctcaaaatatgccaaagaagtctcttttggggtggcctattttagctttttgcatatcacaatatcacaaattattaccaagaagtttgtaatatttgcactggtactgaatccactgtagtttagccttgaaagttcctagcctatatatgctatttatgtagtttttttattcaaaggagtatcagtataaccagataaatcatttcccagacattgctgggtttttttctcaaaagtgcacagcttacttttcagcactaaatcggtatcattgacttactagttgccagtgacttatgtatagaacttaagctcaatattgctttaaaaattagatctttgtgggtactgataagggagaataaattaaaagtatatttttaaaaattagatctaagggggaaagaaggtaaaataattttacctgggaagaggtcgttttccataaagtcacagcaagttgtacttcctctgtgagaagcagccttatcaatgacaaattacaagagttggaatgaagggaagttccatctctcagttgttggagaggaagcacctggtggtgcacattgtgcagtcttcacccttcagagtgcagaccatgttcacggacgggcatcccagggccaaggtggctcttcccatggtagaaaagaagttttcaattttttaaataaaatgaattagcaaaatggccttttatagaaaaagcaaaactctagggacagaaagcagatgaggagctgccagggcttgaggaagctacacgggcacacaggaacttttcagggaaaagagaatgttctgtgtcttcacttcaacagtggtcacacaactgtatacatcccttaagactcatcaaactgtgtatttaagaggagtgcattttactgtatgcagattatacctccatttttaaaatgatgttctttgcaagtcttatattagaagccatgtgaatattttttttcctttgctgcttaaacacagatgatccacaagctggcagcccgagctctaatcagagattatgaagatggcattcttcacgaaaatgaaaccagtcatgaggtttgttcttttcattgtaaaaatgattagacattcttcttgagcattcttacattgattttatctgtggaaatggaaagtgaggtcagctgcgtggagaaggagactggtgtcagggcattcatcactgtatctgtgacactgtgcctgggatgtggggtgtgtggtaaatgtttgttgaatgaattaacaaaaggatggatgtcagtggtttccagaaaattctgtaatgttttacttatcagaagaagccagaggagggctcagagaacactcgctgagtgcctgtagtggacgtcacctcagatctctcgtgtggtagcgttagtattcccatcttactgatgagaggcctgagagcgaaatgctgagtgacctgccaaagcccacctgactccccccatgctgtgcagaccagggcctcagcagaggggctcctcagccaggccaccgggactgcccagctgttctctgagggatgagatcttcaacaaggctgtgaacgttagtcctcaatgccatccccacaagaaggtgacagcaggccctggagaccctcacagtcagttctagtgacagatggtcacctggtggtctccctattctcctcagatgctgctgggttggcagcctctgtgtgctgttttgtttaaggcccttttatcctgaacaagtcattccatctttccaattcctcagctttaaattgggagccacagactgtgaaagaatgagaaagcccactgcccgggagagctctctgaactagagggagctgaataatgaagagcgacactttctatgactaagtcagttcatctcattttaaagggaatattgagccaccgatttagatgggacctgcaattcaatatttagtctgaaatacgaatcttaaaatgatttactgacatagcgaaatagaaataaaacaggacatgatttatgttttattctatcctagatgaaaaaacaaaccttgaaatctctgattattaaactcagtaaagaaaactctctcataacacaatttacaagctttgtggcagttgagaaaagggtatgtattattggtaattcgaggttaaattattttatttgtatttccacattaagaaagtcacccttgctttgatggttaatgacgacatccacaccctgggcctgggaagtgtgggttgcagacaggtcagcaggccccacgagtcccagcctcccattcatggggggcttcggtgttgggacttagggtgatctttctaaatgagttgagtatgttatcatttttaatgttattattaacaattggctaatgtgtacttttcggttatactataattttgttacagttttggcgtttattgtcttttattaatccaagaccctcaaaaaatagaaaaggccgaaaaggcctgggttccctgagagcccttccccttcataagtttaagggggaaattcacgtaacgtgcccagcacagtggccagcacctgccagtgctccgtaaagaggaaagccactccacctccccacttcccctcacgcttgtggcccacggcacaagctccagtcccacacaccagcatatcccaaaccaacaccccataggctttagaatgtgtagtcatcatttaattggataacatctgtttgatttaatctatttgtgattcaatataggatgagaatgagtcgccttttcctgatattccaaaagtttctgaacttattgccaaagaagatgtagacttcctgccctacatgagctggcagggggagccccaagaagccgtcaggaaccaggtaaatgctgattaccgaataagttgatattgagctttcgttttttcatgaagatgaagggaaccctttgctaaaatagctcccttcttacctgtacatgaagaagttgtatccctgatgatggaaaatattcatgcatttataaaatgttgaattacatcatgttgcattacagagacttcacaatgtgtgaatggagctgtatagtacaaaaagagaacacctctggctgtgcttctatcatgggcaaatagattgtcatccaggaagctagagtcatttaggtagtataataggtttgtcatgaaattatcaatagaagtgctatctaataatctaagttcaccaccaatatttcttaaagtttatagtgctttataccgtgcccttataaccagaaacataatagaaatggaaaaatgtggcttaaataaaaattggaagaaaaattcaaaaacaaaggaacaacacagtgctgacaaccctcttaggtctctaggttaaaaaactaaaatttccagaatttaaaaatttaaaatctgatccggcaccgtggttcacgcctgtaatcccagcactttgggaagctgaggtgggaaaaatcacttcagccaggagtttgagaccagcctgggcaacaaagcgagacctcatctctacaaaaagtcttttagggcgggcacagtggctcatacttgtaattccagcactatgggaggctgaggcagcagacgacttgagcccacaagttcaagaccagcctgggcaacatggtgaaaccctgtcgctacaaaaaaatacaaaaattagctgggcgtggtggtgcttgcctgtagtcccagctactcaagaggctgtggcaggaggatgcttgcacctaggaagcagaggttgcagtgagccaaaatggcacccctacactccagccttagtgacagagtgaggatttgatcataaataagaaaataatatacgaaagatgtgcaaccttgtttctaaaagaagttaaaatgtaaactgccatgagattcctttttattttttaactctgtcaggttggcaaagatcacaaaaggtagatgattgaaagtcagtaaacacagtggttaagatcacaggtgctgtggccgaatgctcaggtctgaaccccagcccgcgcttcactctctgggacttgaccttcccagtgccccagtcctaatgccctagtggggagagcagtaaaatccacctcaggtggttgtgaagagttctaagaccattccaacacgtctagctcctggatatttgataaatattagctgtagttattaattctcaaaggtgtctgaaacgggcactgttgcccaaacagatggggcagaaagctgaaaagtggccttgggtttggagggatacttgatttctttttttttttttttttttaattttaattttttttttttttgagatagagtctcgctctgtcgcccagggttgagtgcagtggcatgatctcaattcactgcaacctctacctcctgggttcaagcaattctcgttcctcagtctcctgagttgctgagattacaggtacgcgccaccacactcagctaatttttgtatttttagtagagatggggtttcaccatgttggccaggctagtctcgaactcctgattcacccgcctcggcctcccaaagtgctgggatttcaggcatgggccactgtccccagccttgctttcttacagtgcacccttttgtatattttgaattttgaaccatgggcatggattgcccatgaaagaaaaataatactttaagcaaacacaaagagtttggggagtcaggagtagtaggaggtgcattcagccaggctcaggtggccccgtaggctcacccacaggcagggcagatgttggcaacatcgtgggctcccacactggtccggacttccaggtcagccaaagaatgggactcagggctgcttgaaggaaagcgaggggctaagctgaggggctgtgacctgtggcctctctctgactgcacaggggcccttggagtgcattgttttggggaaaaaaaaattctgatgtacaattaagaatcaactgtttgtccttgagacttactgttaaaatgggccctggaaaatatatacttatcttatatgtgcttcaaaagggcacacccagaagcagctctgaaaatggagatggtcatggttgcacaacagtgtgaatgtacctcgtgccactaaactctaaaaatgactaacatagcaaacattgttatatacatttttcccacaataaaaattaaattaacaaaaataagagatacgcccctacactctgctacatatgttaagtgttttgttcacagaaaaggtctggagggatataggccatagatcagataagacattctgtatggcttttattttcttctttgtgtctgtctacttgtgtctacttgtattttctaattttctcatagtgcacatgtgttgtttttagattttttttttttttttgagacagggtcttactctgttgcccaggctggagtgcagtggcaccatcatagttcaccgcagcctcgacctcctgggctctagagatcctcctacctcagactcccaagtagctgggattacaggagcgagccaccatgcctggcctgtttatagaaatttttgaaattattttcaaaattggttctaaattaatttaggttttaatacagtgtgatgataaattatttcatactaaatttgcaaatacgttggatcttaatacttccagatccaaacatatcagatgaaaaatattatccattagcttgatgacttgaaagtttatgttagctgcaataagttgtttgaacggaccatgtaatttagcaaaaatgtcaagcctctgttactcttcctcgatatctgttttaccaaaatgtggcacctgccgcattctacacggagtcattccactgaattcagtaacacgccagccgcaatagagcccggacatccaggtctgtttggtccttcccgactcgctgaagcttggggcatttccttatttgatacatcttcattgtgaaatgagaccctccagggagcgcaacaccttttctgctgggacgtgctcaggaaggacagcgctcagtgctgtgtgctcttgtcctcccacagccacgcctgggcttaggcgcagtgtcttctgcaccaaccccaaatccacttcgttccctcccgctcatgaaagcacattgagaacaagcgagaggcagagatttttaaaacatacctcctaatccaagtttttaaagtaaatcatttgtaaaattcagtgctataactcttagcaagaaattgagggcactgaagctgagggtccagagcccacgctgttccttaaatcaggggtccccaacccccagtccctggcctgttaggaaccaggctgcacagcaggaggtgaggggcagtgagggagcattaccgcctgagctcgcctcctgtcacgtcagcagcggcagtagattctcatgggagccccgaacctgttgtgaactgtgcatatggaacatgtggaatactttcatcccaaaaccatctgccccacccctgtccatggaaaaattgccttccatgaaaccagtccccactgccataaaggttggggaccacaccttaggtgatcaagatgtgagtatgtggttaagcaaaataagcaattgtgaacttgaagggaaagaggaagcaagtgagtgattttgacaaatagaagaatcataatgaggccaggcacggtggctcatacctgtaatccccacactttgggaggccaaggtgggtggatcacctgagatcaggagttcaagaccagcctggccaacatggtgaaaccctgtctctactaaaaaatacaaaaatactattcaagaaggagttttataaaataaacaaaaatgacccgtatttctcagtatgattcttttttttttttgagatggagtctcactctgtcacccaggctggggtgcagtgactattcacaggctctatcacagagcactacagctttgaactcctggcctccagcgatcctctcacctcagcctcctgagtagctgggatgctccacaatacctgacttaatcaattttttgatctttgcatatcttacaggtgaaaaatgtattggtgacatttaagtttttgtttctttatgaatgaagaggagcatgttttatattcttacagccctatgtatcacttcctgggtgttatctgttcacatcttttatttttttaattgagattttagtcatttttttatttatcttaggtaaactttttatgttagggaaattagccctttgtgatatgagttgtgaaaatttgtttcccggtattccacatgttattttgatgttgcttattatcttttggtcatgcagattttttaatgcagtcaaatttttaatctttgtgtttcttctttttgtttagtgttgttttgcttttcatcatgcttagaaatacctttcctagtcagagattatacttttaaaatttttccctttatttttaaaatagttttatgttttcatgtttacattcaatttttcatctgattgaaatttatcctagcataggataagagatatggaaccaactttattcttttccagatggctcctccttttcctcttattgacttgaaatgccaccttcataatctagtaattctcagatttaggagctattgctggacttacctactctgttccattgattcgtctactataattattataattttataagagactttaatatctgatagttctagtccatcactattgattggttttttccagtttgcttctctaatttttaaaaatttaacctctggttagcattattttaaaatatgtcttttcatatgttctataatattaattattcaggtataaacttgaaatttgactgagttgggaaaggactactccttttttaaatcattcatattcacaggtaaaattacaggctaattatttcaaaaatatcaaggacttgacatgcatataaaactggattttatacatgcaactttttaaggaacactctttacatttagattgaaacaatagtagtaatatagcatccctcaaaatttgttttacatacatattgttcatgttctagtataattatatgttcatttaattacttgaaagcttttggctggacacagtgtctcacacctgtaatcctagcactttgaggggccaagctgagaggatcacttgagcccaggagttcaaaaccagtctggtcaacataatgagaccacatctctacaaaagaataatttaaaaattagctgggtatggtgtcacatgctcatagtcccagctactggggagtctgaggcgagaggatcacttgagcccaggagttcaaggctatagtgagttgtgattgtgccattgcactccagccccaggcaacagagcaagaccctgtctcaaaaaatgagtaagtaaaaataaataaagcttttgagactgtttttccattttgatctcattttcttaatattgctgtaaagcagtataaaaactgcaataattgacttcaaatgactgtcttattttaggcctaagtacaccctgtgatactgctcattgtaaaatcttgggcaagtcacttctgtgctcctcagttccctcatgtgtaaaatgaggggtgtttaaaattccgcaattctaagaactaagaactaagagagaaggtctttcaatatattgattgctgatattctctccaggtctcagcttccatgtctagaaatagacagccttgtactgaaatgatcttgaatgtctctggtggcattattttctttctttcttttttttttttttttttttgagacagaatattgccctctcacacaggctggagagcagtagtgcaaatctgttctcatagctgcctcagcctctcaggctcaagcactcctcctgcctcagcctcccaggtggctgggactacagtcatgagccactacacctgtctaattttttattttttgtaaagatggagcctcgctgtgtcacctaagctgttctcaaactcctagccttgagcgatccttcctcctcggcctcccaaagtgctgagatgacacgcgtgagctgctgcacgcagcactggtgttattttcaacatcccagctcacattgatgatcctgattctggatgagcaactgcctgatgggtgggaagtcaagtgctaggaagaatgtttgcttgattgttctttttattctgtgttttccccttacgttaataattctgtcttctgggcagtctcttttagcatcctctgagtggccagaattacgtttatccaaacgaaaacataggaaaattccattttccaaaagaaaaatggaattatctcagccagaagtttctgaagattttgaagaggatggcttaggtgtactaccagctttcacatcaaatttggaacgtggaggtgtggaaaagctattggatttaagttggacagagtcatgtaaaccaacagcaactgaaccactatttaagaaagtcagtccatgggaaacatctacttctagcttttttcctattttggctccggccgttggttcctatcttcccccgactgcccgcgctcacagtcctgcttccttgtcttttgcctcatatcgtcaggtagctagtttcggttcagctgctcctcccagacagtttgatgcatctcaattcagccaaggccctgtgcctggcacttgtgctgactggatcccacagtcggcgtcttgtcccacaggacctccccagaacccaccttcttcaccctattgtggcattgttttttcagggagctcattaagctctgcacagtctgctccactgcaacatcctggaggctttactaccaggccttctgctggcaccttccctgagctggattctccccagcttcatttctctcttcctacagaccctgatcccatcagaggttttgggtcttatcatccctctgcttcctctccttttcattttcaaccttccgcagcctctttgactgccaaccttaggctgccaatggcctctgctttacctgaggctctttgcagtcagtcccggactaccccagtagatctctgtcttctagaagaatcagtaggcagtctcgaaggaagtcgatgtcctgtctttgcttttcaaagttctgacacagaaagtgatgagctatcagaagtacttcaagacagctgctttttacaaataaaatgtgatacaaaagatgacagtatcctgtgctttctggaagtaaaagaagaggatgaaatagtgtgcatacaacactggcaggatgctgtgccttggacagaactcctcagtctacagacagaggtatgtgtcttatttctccttaaatctgtggttggctggcttcatagtttagaacggggctcctcaaagcagctggtcaaggaaccgtctatcatcagtctgtagtgaaggaaggggttgtacactgggtataaatcatactgcttccttcattgaggaactcttgctacaaaacaaaacagacagctgaacaaaacagtgtgcttgatgctggctggtgtttctctacaaacattagaccagaacctcatgctggtgaatgttactattcctcacatgaaaatgaacatctctgaacagatgatggggtgagatcttaatttcctagattctagaactaatggattgtaatccacataaatttcccactgtgaagtagagcacaagcacttgtacctgtactctaaatattttcacataggtcatgggaatacagatattattcaacatgtatattgtgttagagcttatcactccatttgttaagctgataaacaccctgtagatttggccccatcgctggtactaagacccagtcctgcatctgtgattacttgttttggtgtcaagtagtttagtgaaacggaaagggcttgatgtagtataaaagtaagcctgagtcccagcccactttgtgatttggggcaagtcaggtaacctgtctgagcctcagcttcctcatccatatagtggagataatgatagtgtctacttcacagagtgggtttgagatttaaacaggataatcacagctgcccagtttccctacttgagacagtgcacccaaaagcctgccaggagcatactgcagatggtcaagagtgtggatcccacggccactcctggctctgctgcttgttagctgtgagactttagacaaattgctttacctttctgtgcctccatgttctcatctccagtgtgggtgtgataatagttgttggggtgatcagacccaacaccaggtcatgggggtgacaaagtccagtggagtcaaaggattgagaaaaagacagtttgagagagaaaggtgggacaccagtatgccatcactatggtggaggctgcgaaggccccgagctctgggagcccacggtatttattgataatccaacaaagaaacagatggtgagaatgtggaggtcaaaaggacacgttgcattaagtacatgatttacagctgcgatggtttagcatttatatggaacatattctgctacttgagataatgggaacaggagcctaggaaggctagaagcaaggagccagcaagtctagacacattccagaggacgttacgcaagccctgcctcagtttccctcccaacactcagctttttcccaacaatagtactccacaggaagtggctaaacatatcaaagaacagcacctggtaccacttctctatgggttggtacatattatcactgcggtcatttttcaaggtattgccatagattcttcaacctgtgcacctgcctaggaccacaccctgctttctactccctgtgttggtttccctagggtcttgattctgtctccgttgaggttaatatccccaagctcaggcttagcacattctcctgtgcatgtgatggggcaggcagatgatgggggatgcagggaaggtagttttaaagtgcatgtttaatataacaattttatgcttagaaaaaactgtcattttcatgtttcagactacatcagggtacatttttatgttaaaccaaaggaatcatgctggagatctactgtacaatacagggcctatgattgacaatccgatgtggtatactgaagcatttgctaagaggtctatcttatgttaagtactctttccacaaaagggaacaaaacaaagcaaaaggggtggaaggaaagttctgggagtggtggctaagttcatggcattgataagtgatggtttgatggtttcacaggtgtatatttaactccaaacacatcaagttgtatacgttaaatgttggtgactttttgtatgtcaatcatatttcaataaagtgggttttttttaaagagggaatcatgcatgacatatactttaaaagcttgagaaataccggttcaatgctcattgctagttgacaacccagtagggtgactatcgttaacaatacattgtatatgtcaaaatagctagaagaaaatatttgaaatgttgccgacacaaagacatgataaatgttcaagctgatggagatcctaaacaccccgacctgattatttacattctatgcatgtatcaaaatatcatgcgtatgtcaaaatacatacaagtattatgtatcaataaaaaatgaaataaagcattgctagaaggaaaaaagtaccatttaaaaaaatctcggccgggtatggtggctcacgcctgtaatcccagcactttgggaggccgaggcgggtggatcatgaggtcaggagattgagaccattctggctgacatggtgaaaccccgtctctactaaaataaaaattaaaaaatctctacccatgagcctctttccacactttttataagtgccaccagatatgtagtgttcatagcatttatgaggttccaaacaatactatgtcactagtgtatgaagaactttattttacagtaataaaaatgttagaaatgccttaattaactgaaataaatggaaacatttatcacataacttcttttttcatttaatttgttaaagttttattttagatgcagaggtacacgtacaggtttattacatgggcataccgtgtggtgctgaggtttgggcttctaattgtcttgttgcccaagtagtgaaaatatgtttttcaacccttgccccactccttcccccactacgtaacttcttatgtgataaaatgtgaataacataacttatttttgtttccttaattttgtaggatggcttctggaaacttacaccagaactgggacttatattaaatcttaatacaaatggtttgcacagctttcttaaacaaaaaggcattcaatctctaggtaaggcactatgtttccatttattaagtcattattttcattcattaataagcatgctcctaattgttgtaaactgttttgtaagctagtgtattaatgtaataattatgaaagttatattcgaatggaattatatttaaccattaaaggaaatgggagatgggtttctagtcatatttttaccactaattagggtattatctgagcaaatttattagcataaatagcaccaagtgctgtaaaaaaaatctcagaagcttaacatggtaatcaaagattacttttttgtccgtatcacagtcaagtattggtcaggaagaaagttccacttatgtggtcatttagagaccttgactccttccatactgtggctccaccatcttcaatatatgtctttaaaattatcctggtaagagagaagaacaaagattaccctggcatcatccccctgctagacaagaggaagaatactagtcacatagccccatccatgtacgaaggcctgagaaatgtactgttaagctgcgtgtccaggaggagaaaagagctctgatgagctcctagccagcctctgccagaggcagttgttcaacctctggacctgtttcctatcatgacaacaaggggatagatgaggaagtcctgagcatccttgacccagcaagtggtttgaaggtcaaatgctagccctaggacaggagctgttgtttgtttgtttgttttgagacaagatctggctcccttgcccaggctggagtgcagtggtactatctcggctgactgcaacttctacctcccaggctcaagggatcctcccacctaagcctcctgagtagctgggactacaggcacctgccactatgcctgactaatttttgtattttttggtagagatggggttttgccatgttgtccagtgtggtctcgaacttgtgagctcaagcaatctgcccaccttggcctcccaaagtgttgggattacaggcatgagccaccatgctcagcctggagattttttttttaaataaaatacacattattaaacaactagccaatattcatggatagatagagcagcagcgtctcactgccccaccatcacctctaaaatgccagagttttcatattccaggctgggtgggtgggcaaatgcatagcctgtttgacctgcactaggccaaaaaggggtgatgacaatttacgtgaggagtgagtgcttgatcctggaataatagaagagcctctatctgactaactctcctgccaataacagttattaactttgaataaaatatttaaaaccattctttgaaggccaggagaataatccaaaacaggcagaagctagagtgaacataatctttgaaagaaagaaagccaactaggtgggctccacacgtatccagcttgtcacctaaaggcatttctcagctcatgagacacaatgggatgtttgaactaaaacagaaagtcttaacgggatgaggacatggggttggagtttaaggttgccaaagtggctggaagttaaggattaaaatcctataaaggagggaaccacagagcagggaactctgaaatctgcatccagataccccgcagatccttggctgtctcctaacctctacatatacaggtgcaacctcaaggaatccagaaaaaagcaacagctgggaagctacagagctaagcagagatttcagctgctgcctagtactggccagagtttagagttcaagtggcaccaaattagagagactttataaatatctttccattgaaaccataaaagggtcataaggatcatatctcatgatcaaggactataccccaggacatagggataagccaaaatagacccatcctaataaagcctaaaacaaagcctacacaggacctaccagaacaaaactgaacattctttagagtaagatagcatagctgagagtctctacaaggcgtcatttttaatgttcagtatggaatgaaaatttaataacatacgaagaagcaggacaatatgatcatgatcaaggggaaaatgggctataaatgctgacccacagatgacccagatgttagaattagcagacacagactttaaaactgctattaaaaatatagtgaaggattgacttaccagaaaaggatggaatgggtgaatcgcagaatctcagcaaatagatggaaactataaagaaaaaccaaattaaaatcctagaactggaaaatatagtatctgcaatgaaaaggtcattgaatgagcttaacaacagaatggacagaacaggaaaaaaatcatttaattcgattgacaatgcactcaataaacttacctaaactgaaatatagaaagaaaaaaaatagaatgaaaaaagaacagaggagccaagactgtggaatgatatcaaaaggtttaacatttgtgtaaccagggtttcagaaggtgaaaggttagatagaaaaatatttgaacatttttgtaaaattgatcaaagacagcaccttccagatccaacaaactcagcagaactccaagcactataaatacaaaaatgaccacatttagataggccagagtcaaactgttgaaaaccaaagataagccaggcacagtggctcacaccagtaatgcctgcactttgggaggccaaagggggcagatcatttgagctcaggatttcgagaccagcctggccaacatggtgaaaccccatctctacaaaaattagccaggcatggtggcgtgtacctgtggtcccagctacttaggaggctgaggtgggaggatcacctgagccctgggatgttgaggctgcagtgagcagtgattgtgccactgcactccagcccaggtgacaaagtgagataaaaattcaagataaatatattgtcaagtgaggctggagctcatggaagaggtcagaattggaaaagactgggaaaattctcaacgttagtagtatttaaagcctggctctggatgagatcacccaaagaaagaaggtggactgagcagagcaggtgctaggaccagcctgctgcacagcagggtttagtgttcagactggacaagaaacagcaaagacgctgagaaggagcggcctgagaaacaagaggaaaactggagaaaattgagtcacagatgcaaggggatgggatttcacagatgtgccttatccatgggcttttcctgtgtttcactgtattgctccctattatctgtgttatttttctgtaagcgtgtgcttttctgccttccttcttcgacgtagagtctcaagctgtcttttttctctgacttgtttttatatctctgtacccaactttgtcttttatcctcttcttcatttctcttttatcatcccctctccttctgaatttgttttttaaatgacgctgatacacattaggtatttcatcagtttattatttattatattattcttggagttgtatgttgcttattattaa

SEQ ID NO: 1031 - DNA, 32183 bp, Homo sapiens
acaaaaaattagccaggcgtagtgacggacacctgtaatcccagccacttggaaggctgaggcaggagaatcgcttgaacccaggaggtagaagttgcagtgagccgagattgtgccactgcactccagcctgggcaatggagcgagactccatctcaaagaaaaaaaaaataaataaaatgaaataataataaaattgagcaagctgagactgaccagctgcctcagccaggctggcaaatccagggctgattggatgggacatttcttcctgtagatgtcatagtcctctggaaactgtaaaaaatcaaataagcgtgaggtgataatattatagttactgtgtgacatgaaataaactaaaaggacataagtttagttgtttcacaaattagggaaagaaaatattttcggtgtcaccatatccctacactgtccttagatgtgtcaatgatgacagcaaatggtgactgcatccaacaaggagaacataatctttcacttcatttcctccagtctgccacacctaccatggggaacacagacttctggaaaacactccgatatcttagcttattgtaccctgctcgagggtcacggaacatcctcctggtgtctgatgggcacctccaggatgagagcctgacattacagctcgtgaagaggagccgcccgcacaccaggttattcgcctgcggtatcgggtgagtctcagagagctggtcacatagtccagacccacggggaggtcgtcttgttgccctgcaggggactttggcaagcttggaagttgacactagaatacagaagccttacagcatagagggatggggctccgggctcccagccagactgcctgagtctcagaacctgggttggccactcattagcttagccgtgaccttgagcaagttccttaacctctcatctgtaaaaccaaggtgataatgaaaatacctacctcctaggattgctgaggaataaatgagctcatacatagaaagcactcagaacagaactgaaccaaaagcaccaaatcagttagatgttattatttagcataagaatccaaatctccgcttgtcccgaagggcctgggtaaacctcctcactggctgtgctggactcgtgctgggggcatgtgacctccaggcagaccccgccaggctgctttgctccttcgcatctcttttctggccattatgagcacttgcattttcaaaccctgtggtgtgcatagaagctttccatgagaggctaacacccctacattgttggaattgccccttccccattaaaagttagttcttttggatggcactaaggtatgcggtgtatgtgtaaggaaaacatcgaacagagggggccacttggtgtctgcataggacttgcccatcctgcctgcctctgtggcccctggactcctacctgtggccaccacctcagcaagtggtcaccagctatctggtggcagtgcatggagcagatcctcagcttcttcatggggcagaatgggggcctctttgctgtccttgcccctgagccttgacctggactcgccctgagctccaggagccagcacccccaatgcccctctgtggccccgatgcccctccatggcccccagtgtccctctgtggcctccgacacccctagctgctatactcaagccagctctgcctgccttgagggctttcttctctttgtcctccactgtcacagctcctggctctgttctctgtaatctaaggcctagcccagcatcacaggccaatgaagaaatatatccagcctgagcagctccaccaggagttgttcctgatgggacttcacctgctgagctcacagctgcgctcagggcagcctgtgcaccgtctcctggtctcagcagcccctccctgccccctgctcccaggtcagggctcagacaccacagggcagaggtactggcacctattcatgccttcctcagtgagggcctattctgggacgaacatcgggccccgactctggggctgggagatgggattttcccatgtgccagggaggaaatcaagggagtgtgatgaggtcaggctcagaggctcactcctgtggtcccagcactttgggaggccaaagcaggaggatcgctccagcccaggaggtcaaggctgtagtgagccatggtcaggcagttgcactccagcttgagtgactgagcaagaccccatctttaaaaataaaaaaaaaattgaaaaatgtaaggcatgtgacggggagtctgggtgtgcagtgggggagcctgctccaagaggagactctgccagttagcaccgcccatgcctggagggggtggtatccattctgcttttctgtcgagtttttgggatctttctaagtgtttctccctcatcttccaagcatgtgtttgcaattacaaactctagtaaagtgagcttcccaggggtagagaccatcagccctcctccttggcgtgagtcctggtcctctgagagccgccctgaaggagcacaggaagactccagcctgcctcgctaacagacagaagctgtaactaccaataacccatgttagggatcttctagtcaatgttatgatcatcaccaattaatatggagggtaaagacaaatccatctttatccataggttgaaaaacatcttggaaattattttcataagctctttttctgaaaaataattgatgttttctttaatatttcaggaggaattcctctaagcaaggagttcttgatagttgtagaattattgtagagagaaaagtaatagggcacttgtcatttaaatgtcagagatgctctttgctagagtgagagttgcttctttatgccttttgctatgttgatgtgtatcagatttcaagaggtagactttattcactctttgccagctctaggcctttgggatcagattcaggtaatattgttatttatggaaattaagttgatatctttgtcagcattctgataccttatagggttgtttttagagtcatctactccctccctcaggaactgaaagtcaagaatttcaacttttttctatttgaaggataagtcagtcctctgatagatgggagcttaaattagccaaactttcagatgtttccttctattatcactttctctgtttaacctcagcgacacacgagtacattcttccccacgtcatgtctctcctattgagttgtgagctttctcaacactgttaacatgtacttcaaaaatatttctaatgtcttcaaaattaaaacatgtgaaatgtgatcagttctacagcaaatcgtcacgtcttaaggattttgtcccagtgtggtgccggagtatttgaatattttaatgcaaaatccaagcatagttggagaaaacaggtatgttttttaaacatctggttttatatttatgtttggaaatctcttattcttccgagactaagaaataggaatatctgtgtttccttgaatgagaggggagccgtaaagaggcaagcactgccgcaggtgtgagccctgcctcaggactgcaccagcgggaacacaggtgttcttcatcaggtcattctcccagcttatggtttgatttctgccttaaaaatcatggactgattttttttaaagtgaattattaaatatgttttgctgaaattgtttccttattatgataaaatttagcattttaattttttttttttttttttttttgagacagagtcttgctctgtcgcccaggctggagtgcagtggcgccatctcggctcactgcaagctctgcctcccgggttcacgccattcttctgcctcagcctcccaactagctggtactacaggcaccagccaccatgcctggctaattgtttgtatttttagtagagatggggtttcactgtgttagccaggatggtcttgatctcctgacctcatgatctgcccaccttggcctcccaaagtgctgggattacaggcgtgagccaccgcgcctggccattttaaccatttttaggtgtacaatttagtggtattagctacattcacaatgctgtgcaaccatcaccatcttcaaactgtttcatcagcccaaacagaaactacgtactcattaagcagtaactccacattccctcctacacccagcgcctgctaaccatgactctactttctgtctttatgactttgccttttctgagtatctcatataagtggagtcataggacattgtccctttatgtctggcttatttcacttagcatgatgtttttaatgtccatctatgttgaagcatgtgtcagaatttcccttctttttaaagctaaataatattccattgcatggatggaccacgttttgcttatccattcatctatcggtggacacttgggttgtttctgtcctttggctattgtgaataatgctgctatgagcattggtatacaagtgtctgtttgagtctgctttcaattctggatatatgtgcagcgtgggattgctggatcatatgctcattttatgtttagtttttttgggaattgccatgctgtcttccatagcagctgcatcattttacattcccaccaccagtgcaccaggattccagtttttccacatcctcaccaacactcatcattcttttttttttccttattgattgaaatcaatcagcttttctttggtttgttttggtttttgagacacagtgttgctcggtcatctaggctggagtacagtggtacaatcatagctcaccacagcctcaactttctgagcccaagcaatcctcccacctcagcctccagagtagctgggactacaggcatatgccaccactttttttcttattgttttttgtttgtttggttggtttttgtttgtcgttggtgttttttgagacagagtatcactttttcacccaggctggaattcagtggtgcaagcttggctcactgcagccctgacatcctggtctcaagccatcttcctccctcatcccccaagtaggtgggacaacaggcccacaccaccacacccacaccaccacacccagctaattttctgtagagacagtgtttcgccatgggcctaggctggtctcgaatcccaagctcaagcaatctgcctgccttggcctcccaaagtgctgggattacaggcatgagccactctgcccagccaccacttgttttttaataacagccatcccactgggtgtgaaatgggatctcaccgtggttctgatttgcacttccctaatgactaatgacatcaagcatctttgcatgcacttgctggcttttgtgtatcttctttggagaaatatctattcaagtactggaatctactcataccaaggctgcatattagtaattagctaaaggcataatttcaggatgctttgtaaatgaaaaggatatgatcatgctattatttaaaattctagctgggcgtggtggctcatgcctataaccccagcactttgggaggctgaggcagatggctcacctgaggtcaggagttcgagaccagcctgggcaacatggtgaaaccccatctctactaaaaatacaaaaattagctgggtgtggtggtgtacgcctgtagtcccagctacttgggaggctgaggcaggaaaatcacttgaacctgggagggggaggttgcagtcagccaagattgtgccactgcactcccgcctgggcgacagagcaaaactccatctcaaaataaaataaataaaataaaataaaattctgtttaaactattttcgggaaagtaccctgtagcaggaaggagagaaaataccagagttataaaattcccaaaggatagaatgtatactttattttaaatgtgaagtaactattttctggatggagcattgaaagagaaataattcctcttttataaatagatagaagaccaaatgaccaggctatgttctccgagttgccactctgtctccgtcaaatggcagcaactcaatccagatgtgcccgaggccctgcaggccccagcccaggtgccgtccttgtttctcaatgatcgactccttgtctatggattcattcctcactgcacacaggtaagaagacgcagagtttgttattctatgggaagaccaatatattttgctaattttttttctgtcttcttccctccccttctcaccagcagattttcttcttctgggaacacagctggtggttagccagggctttggggaggcttctagtttttattgaaaggggagagaaaatcaccaaaagaatttctgttaaaccaagacactgcagagtggaaaggctaatgaggaatttatttttttccccatttcaggcaactctgtgtgcactaattcaagagaaagaatttcgtacaatggtgtcgactactgagcttcagaagacaactggaactgtaagattcaaaacctaaactatcaacccattgtttgaaagttatgattttatatttccatatataatgctctatgtcaagcttgtccaacccacggcccagggcagctttgaatgcagcccaatacaaattcgtaaactttcttaaaacattatgaaattttttttcaagtttttgttttcagctcatcggctatcgttagtgttagtgtattttatgtgtcacacaagacagttcttcctcttccactgtggcccagggaagccaaaagattggatacccctgctgtctgtactttgttgttttcctgtgttgaaatttcattacacaatatggagatggactatatgtacaaatgagtatactttccttcagtttctaatgcagcacttcttcatctggggtagtttggtctaggtatgtctatatgggcatcagtgggtggcaataactgcaattaagtatggcatttatgcatggaaattttgctagagaggttctcaaagatgttcataactcaataaaggtacatgccactggcctactgatgctatttagaaatactagttataataatactggactaagagtagatcatatcgtatattgaggatgtgggtttatttccttttttgattaaaagcaaatgaattatgaaagaaaaaattcctgtttcccaaatacaccatttctggtttccagatatgtgtttttcccaaccaattctctgacaccagttgcatgtcctacaatttaattcaattctgacactggccgcctggggttggcacagacctcacagagttgagggctcagtcccacaagactgattccaactccagacaccggtagcaagtagcaggtccccaggttacccacacttctggtcagctccaagtcagtgttcccacaaccctttctcacagaaatttctcaaatttcttacagtaatttgctgtaacagctcacagaactcaggaaaagtttaccttagtattactgatttattgtaaagaatattataaaggatacgaatgaacagccagatgaagaggtatacagggtaaggcccagaatagtcccaagcacaggagcttctgtctaacatacagttggggtgcaccatcctcctggcacatgagtgctgacccagaagctccctgaacccctttaggtggggtttttaatgcaggtttcattacaaaggcctggttgattaaatcattggccattggtgattaactctcccctctctggaggttggggagtggggttgaagtcccagccctctaatcatatggttggttccccagcaaccagccctcattctagggactttctaaaagtcacctcattaacataaactcaggtgtggttgaagggtcctgttaggaataacaaatacatacatttcttatgtctgtagggaagttcagactttccctctgaagtttccatgtttggtctataaaataatccaacgatagattaacaggggaagagacatgcagatgtcgttacgtgtgcacgagccacgtgagactcaaagaagggccagatgagtgaagtttcataccgtacagaggcgggtaggattgtggggctcctgggggaggtggggacaggttgtgggagggtgaggggaagaaacacgtggtgagcaaaggctttcttgtgatgcagatgaagtctggcaggcagcagccctgagagaatagaagcacctctggtaacggtttctctatcatccctttaaagtatcagactttagcctcctcttcctgggagttcatctttcctaaatctggataaggcagataagggggtctcagagaaagcctgtttgcatctgctgtttccttcactgacatacgattcctctgcagatgcaaatattccctgcaaaaggactgcttttcagagctactcctatgtctgctgtccctctgaatagcatctcaaaatatgccaaagaagtctcttttggggtggcctattttagctttttgcatatcacaatatcacaaattattaccaagaagtttgtaatatttgcactggtactgaatccactgtagtttagccttgaaagttcctagcctatatatgctatttatgtagtttttttattcaaaggagtatcagtataaccagataaatcatttcccagacattgctgggtttttttctcaaaagtgcacagcttacttttcagcactaaatcggtatcattgacttactagttgccagtgacttatgtatagaacttaagctcaatattgctttaaaaattagatctttgtgggtactgataagggagaataaattaaaagtatatttttaaaaattagatctaagggggaaagaaggtaaaataattttacctgggaagaggtcgttttccataaagtcacagcaagttgtacttcctctgtgagaagcagccttatcaatgacaaattacaagagttggaatgaagggaagttccatctctcagttgttggagaggaagcacctggtggtgcacattgtgcagtcttcacccttcagagtgcagaccatgttcacggacgggcatcccagggccaaggtggctcttcccatggtagaaaagaagttttcaattttttaaataaaatgaattagcaaaatggccttttatagaaaaagcaaaactctagggacagaaagcagatgaggagctgccagggcttgaggaagctacacgggcacacaggaacttttcagggaaaagagaatgttctgtgtcttcacttcaacagtggtcacacaactgtatacatcccttaagactcatcaaactgtgtatttaagaggagtgcattttactgtatgcagattatacctccatttttaaaatgatgttctttgcaagtcttatattagaagccatgtgaatattttttttcctttgctgcttaaacacagatgatccacaagctggcagcccgagctctaatcagagattatgaagatggcattcttcacgaaaatgaaaccagtcatgaggtttgttcttttcattgtaaaaatgattagacattcttcttgagcattcttacattgattttatctgtggaaatggaaagtgaggtcagctgcgtggagaaggagactggtgtcagggcattcatcactgtatctgtgacactgtgcctgggatgtggggtgtgtggtaaatgtttgttgaatgaattaacaaaaggatggatgtcagtggtttccagaaaattctgtaatgttttacttatcagaagaagccagaggagggctcagagaacactcgctgagtgcctgtagtggacgtcacctcagatctctcgtgtggtagcgttagtattcccatcttactgatgagaggcctgagagcgaaatgctgagtgacctgccaaagcccacctgactccccccatgctgtgcagaccagggcctcagcagaggggctcctcagccaggccaccgggactgcccagctgttctctgagggatgagatcttcaacaaggctgtgaacgttagtcctcaatgccatccccacaagaaggtgacagcaggccctggagaccctcacagtcagttctagtgacagatggtcacctggtggtctccctattctcctcagatgctgctgggttggcagcctctgtgtgctgttttgtttaaggcccttttatcctgaacaagtcattccatctttccaattcctcagctttaaattgggagccacagactgtgaaagaatgagaaagcccactgcccgggagagctctctgaactagagggagctgaataatgaagagcgacactttctatgactaagtcagttcatctcattttaaagggaatattgagccaccgatttagatgggacctgcaattcaatatttagtctgaaatacgaatcttaaaatgatttactgacatagcgaaatagaaataaaacaggacatgatttatgttttattctatcctagatgaaaaaacaaaccttgaaatctctgattattaaactcagtaaagaaaactctctcataacacaatttacaagctttgtggcagttgagaaaagggtatgtattattggtaattcgaggttaaattattttatttgtatttccacattaagaaagtcacccttgctttgatggttaatgacgacatccacaccctgggcctgggaagtgtgggttgcagacaggtcagcaggccccacgagtcccagcctcccattcatggggggcttcggtgttgggacttagggtgatctttctaaatgagttgagtatgttatcatttttaatgttattattaacaattggctaatgtgtacttttcggttatactataattttgttacagttttggcgtttattgtcttttattaatccaagaccctcaaaaaatagaaaaggccgaaaaggcctgggttccctgagagcccttccccttcataagtttaagggggaaattcacgtaacgtgcccagcacagtggccagcacctgccagtgctccgtaaagaggaaagccactccacctccccacttcccctcacgcttgtggcccacggcacaagctccagtcccacacaccagcatatcccaaaccaacaccccataggctttagaatgtgtagtcatcatttaattggataacatctgtttgatttaatctatttgtgattcaatataggatgagaatgagtcgccttttcctgatattccaaaagtttctgaacttattgccaaagaagatgtagacttcctgccctacatgagctggcagggggagccccaagaagccgtcaggaaccaggtaaatgctgattaccgaataagttgatattgagctttcgttttttcatgaagatgaagggaaccctttgctaaaatagctcccttcttacctgtacatgaagaagttgtatccctgatgatggaaaatattcatgcatttataaaatgttgaattacatcatgttgcattacagagacttcacaatgtgtgaatggagctgtatagtacaaaaagagaacacctctggctgtgcttctatcatgggcaaatagattgtcatccaggaagctaaagtcatttaggtagtataataggtttgtcatgaaattatcaatagaagtgctatctaataatctaaattcaccaccaatatttcttaaagtttatagtgctttataccgtggcccttataaccagaaacataatagaaatggaaaaatgtggcttaaataaaaattggaagaaaaattcaaaaacaaaggaacaacacagtgctgacaaccctcttaggtctctaggttaaaaaactaaaatttccagaatttaaaaatttaaaatctgatccggcaccgtggttcacgcctgtaatcccagcactttgggaagctgaggtgggaaaaatcacttcagccaggagtttgagaccagcctgggcaacaaagcgagacctcatctctacaaaaagtcttttagggcgggcacagtggctcatacttgtaattccagcactatgggaggctgaggcagcagacgacttgagcccacaagttcaagaccagcctgggcaacatggtgaaaccctgtcgctacaaaaaaatacaaaaattagctgggcgtggtggtgcttgcctgtagtcccagctactcaagaggctgtggcaggaggatgcttgcacctaggaagcagaggttgcagtgagccaaaatggcacccctacactccagccttagtgacagagtgaggatttgatcataaataagaaaataatatacgaaagatgtgcaaccttgtttctaaaagaagttaaaatgtaaactgccatgagattcctttttattttttaactctgtcaggttggcaaagatcacaaaaggtagatgattgaaagtcagtaaacacagtggttaagatcacaggtgctgtggccgaatgctcaggtctgaaccccagcccgcgcttcactctctgggacttgaccttcccagtgccccagtcctaatgccctagtggggagagcagtaaaatccacctcaggtggttgtgaagagttctaagaccattccaacacgtctagctcctggatatttgataaatattagctgtagttattaattctcaaaggtgtctgaaacgggcactgttgcccaaacagatggggcagaaagctgaaaagtggccttgggtttggagggatacttgatttctttttttttttttttttttaattttaattttttttttttttgagatagagtctcgctctgtcgcccagggttgagtgcagtggcatgatctcaattcactgcaacctctacctcctgggttcaagcaattctcgttcctcagtctcctgagttgctgagattacaggtacgcgccaccacactcagctaatttttgtatttttagtagagatggggtttcaccatgttggccaggctagtctcgaactcctgattcacccgcctcggcctcccaaagtgctgggatttcaggcatgggccactgtccccagccttgctttcttacagtgcacccttttgtatattttgaattttgaaccatgggcatggattgcccatgaaagaaaaataatactttaagcaaacacaaagagtttggggagtcaggagtagtaggaggtgcattcagccaggctcaggtggccccgtaggctcacccacaggcagggcagatgttggcaacatcgtgggctcccacactggtccggacttccaggtcagccaaagaatgggactcagggctgcttgaaggaaagcgaggggctaagctgaggggctgtgacctgtggcctctctctgactgcacaggggcccttggagtgcattgttttggggaaaaaaaaattctgatgtacaattaagaatcaactgtttgtccttgagacttactgttaaaatgggccctggaaaatatatacttatcttatatgtgcttcaaaagggcacacccagaagcagctctgaaaatggagatggtcatggttgcacaacagtgtgaatgtacctcgtgccactaaactctaaaaatgactaacatagcaaacattgttatatacatttttcccacaataaaaattaaattaacaaaaataagagatacgcccctacactctgctacatatgttaagtgttttgttcacagaaaaggtctggagggatataggccatagatcagataagacattctgtatggcttttattttcttctttgtgtctgtctacttgtgtctacttgtattttctaattttctcatagtgcacatgtgttgtttttagattttttttttttttttgagacagggtcttactctgttgcccaggctggagtgcagtggcaccatcatagttcaccgcagcctcgacctcctgggctctagagatcctcctacctcagactcccaagtagctgggattacaggagcgagccaccatgcctggcctgtttatagaaatttttgaaattattttcaaaattggttctaaattaatttaggttttaatacagtgtgatgataaattatttcatactaaatttgcaaatacgttggatcttaatacttccagatccaaacatatcagatgaaaaatattatccattagcttgatgacttgaaagtttatgttagctgcaataagttgtttgaacggaccatgtaatttagcaaaaatgtcaagcctctgttactcttcctcgatatctgttttaccaaaatgtggcacctgccgcattctacacggagtcattccactgaattcagtaacacgccagccgcaatagagcccggacatccaggtctgtttggtccttcccgactcgctgaagcttggggcatttccttatttgatacatcttcattgtgaaatgagaccctccagggagcgcaacaccttttctgctgggacgtgctcaggaaggacagcgctcagtgctgtgtgctcttgtcctcccacagccacgcctgggcttaggcgcagtgtcttctgcaccaaccccaaatccacttcgttccctcccgctcatgaaagcacattgagaacaagcgagaggcagagatttttaaaacatacctcctaatccaagtttttaaagtaaatcatttgtaaaattcagtgctataactcttagcaagaaattgagggcactgaagctgagggtccagagcccacgctgttccttaaatcaggggtccccaacccccagtccctggcctgttaggaaccaggctgcacagcaggaggtgaggggcagtgagggagcattaccgcctgagctcgcctcctgtcacgtcagcagcggcagtagattctcatgggagccccgaacctgttgtgaactgtgcatatggaacatgtggaatactttcatcccaaaaccatctgccccacccctgtccatggaaaaattgccttccatgaaaccagtccccactgccataaaggttggggaccacaccttaggtgatcaagatgtgagtatgtggttaagcaaaataagcaattgtgaacttgaagggaaagaggaagcaagtgagtgattttgacaaatagaagaatcataatgaggccaggcacggtggctcatacctgtaatccccacactttgggaggccaaggtgggtggatcacctgagatcaggagttcaagaccagcctggccaacatggtgaaaccctgtctctactaaaaaatacaaaaatactattcaagaaggagttttataaaataaacaaaaatgacccgtatttctcagtatgattcttttttttttttgagatggagtctcactctgtcacccaggctggggtgcagtgactattcacaggctctatcacagagcactacagctttgaactcctggcctccagcgatcctctcacctcagcctcctgagtagctgggatgctccacaatacctgacttaatcaattttttgatctttgcatatcttacaggtgaaaaatgtattggtgacatttaagtttttgtttctttatgaatgaagaggagcatgttttatattcttacagccctatgtatcacttcctgggtgttatctgttcacatcttttatttttttaattgagattttagtcatttttttatttatcttaggtaaactttttatgttagggaaattagccctttgtgatatgagttgtgaaaatttgtttcccggtattccacatgttattttgatgttgcttattatcttttggtcatgcagattttttaatgcagtcaaatttttaatctttgtgtttcttctttttgtttagtgttgttttgcttttcatcatgcttagaaatacctttcctagtcagagattatacttttaaaatttttccctttatttttaaaatagttttatgttttcatgtttacattcaatttttcatctgattgaaatttatcctagcataggataagagatatggaaccaactttattcttttccagatggctcctccttttcctcttattgacttgaaatgccaccttcataatctagtaattctcagatttaggagctattgctggacttacctactctgttccattgattcgtctactataattattataattttataagagactttaatatctgatagttctagtccatcactattgattggttttttccagtttgcttctctaatttttaaaaatttaacctctggttagcattattttaaaatatgtcttttcatatgttctataatattaattattcaggtataaacttgaaatttgactgagttgggaaaggactactccttttttaaatcattcatattcacaggtaaaattacaggctaattatttcaaaaatatcaaggacttgacatgcatataaaactggattttatacatgcaactttttaaggaacactctttacatttagattgaaacaatagtagtaatatagcatccctcaaaatttgttttacatacatattgttcatgttctagtataattatatgttcatttaattacttgaaagcttttggctggacacagtgtctcacacctgtaatcctagcactttgaggggccaagctgagaggatcacttgagcccaggagttcaaaaccagtctggtcaacataatgagaccacatctctacaaaagaataatttaaaaattagctgggtatggtgtcacatgctcatagtcccagctactggggagtctgaggcgagaggatcacttgagcccaggagttcaaggctatagtgagttgtgattgtgccattgcactccagccccaggcaacagagcaagaccctgtctcaaaaaatgagtaagtaaaaataaataaagcttttgagactgtttttccattttgatctcattttcttaatattgctgtaaagcagtataaaaactgcaataattgacttcaaatgactgtcttattttaggcctaagtacaccctgtgatactgctcattgtaaaatcttgggcaagtcacttctgtgctcctcagttccctcatgtgtaaaatgaggggtgtttaaaattccgcaattctaagaactaagaactaagagagaaggtctttcaatatattgattgctgatattctctccaggtctcagcttccatgtctagaaatagacagccttgtactgaaatgatcttgaatgtctctggtggcattattttctttctttcttttttttttttttttttttgagacagaatattgccctctcacacaggctggagagcagtagtgcaaatctgttctcatagctgcctcagcctctcaggctcaagcactcctcctgcctcagcctcccaggtggctgggactacagtcatgagccactacacctgtctaattttttattttttgtaaagatggagcctcgctgtgtcacctaagctgttctcaaactcctagccttgagcgatccttcctcctcggcctcccaaagtgctgagatgacacgcgtgagctgctgcacgcagcactggtgttattttcaacatcccagctcacattgatgatcctgattctggatgagcaactgcctgatgggtgggaagtcaagtgctaggaagaatgtttgcttgattgttctttttattctgtgttttccccttacgttaataattctgtcttctgggcagtctcttttagcatcctctgagtggccagaattacgtttatccaaacgaaaacataggaaaattccattttccaaaagaaaaatggaattatctcagccagaagtttctgaagattttgaagaggatggcttaggtgtactaccagctttcacatcaaatttggaacgtggaggtgtggaaaagctattggatttaagttggacagagtcatgtaaaccaacagcaactgaaccactatttaagaaagtcagtccatgggaaacatctacttctagcttttttcctattttggctccggccgttggttcctatcttcccccgactgcccgcgctcacagtcctgcttccttgtcttttgcctcatatcgtcaggtagctagtttcggttcagctgctcctcccagacagtttgatgcatctcaattcagccaaggccctgtgcctggcacttgtgctgactggatcccacagtcggcgtcttgtcccacaggacctccccagaacccaccttcttcaccctattgtggcattgttttttcagggagctcattaagctctgcacagtctgctccactgcaacatcctggaggctttactaccaggccttctgctggcaccttccctgagctggattctccccagcttcatttctctcttcctacagaccctgatcccatcagaggttttgggtcttatcatccctctgcttcctctccttttcattttcaaccttccgcagcctctttgactgccaaccttaggctgccaatggcctctgctttacctgaggctctttgcagtcagtcccggactaccccagtagatctctgtcttctagaagaatcagtaggcagtctcgaaggaagtcgatgtcctgtctttgcttttcaaagttctgacacagaaagtgatgagctatcagaagtacttcaagacagctgctttttacaaataaaatgtgatacaaaagatgacagtatcctgtgctttctggaagtaaaagaagaggatgaaatagtgtgcatacaacactggcaggatgctgtgccttggacagaactcctcagtctacagacagaggtatgtgtcttatttctccttaaatctgtggttggctggcttcatagtttagaacggggctcctcaaagcagctggtcaaggaaccgtctatcatcagtctgtagtgaaggaaggggttgtacactgggtataaatcatactgcttccttcattgaggaactcttgctacaaaacaaaacagacagctgaacaaaacagtgtgcttgatgctggctggtgtttctctacaaacattagaccagaacctcatgctggtgaatgttactattcctcacatgaaaatgaacatctctgaacagatgatggggtgagatcttaatttcctagattctagaactaatggattgtaatccacataaatttcccactgtgaagtagagcacaagcacttgtacctgtactctaaatattttcacataggtcatgggaatacagatattattcaacatgtatattgtgttagagcttatcactccatttgttaagctgataaacaccctgtagatttggccccatcgctggtactaagacccagtcctgcatctgtgattacttgttttggtgtcaagtagtttagtgaaacggaaagggcttgatgtagtataaaagtaagcctgagtcccagcccactttgtgatttggggcaagtcaggtaacctgtctgagcctcagcttcctcatccatatagtggagataatgatagtgtctacttcacagagtgggtttgagatttaaacaggataatcacagctgcccagtttccctacttgagacagtgcacccaaaagcctgccaggagcatactgcagatggtcaagagtgtggatcccacggccactcctggctctgctgcttgttagctgtgagactttagacaaattgctttacctttctgtgcctccatgttctcatctccagtgtgggtgtgataatagttgttggggtgatcagacccaacaccaggtcatgggggtgacaaagtccagtggagtcaaaggattgagaaaaagacagtttgagagagaaaggtgggacaccagtatgccatcactatggtggaggctgcgaaggccccgagctctgggagcccacggtatttattgataatccaacaaagaaacagatggtgagaatgtggaggtcaaaaggacacgttgcattaagtacatgatttacagctgcgatggtttagcatttatatggaacatattctgctacttgagataatgggaacaggagcctaggaaggctagaagcaaggagccagcaagtctagacacattccagaggacgttacgcaagccctgcctcagtttccctcccaacactcagctttttcccaacaatagtactccacaggaagtggctaaacatatcaaagaacagcacctggtaccacttctctatgggttggtacatattatcactgcggtcatttttcaaggtattgccatagattcttcaacctgtgcacctgcctaggaccacaccctgctttctactccctgtgttggtttccctagggtcttgattctgtctccgttgaggttaatatccccaagctcaggcttagcacattctcctgtgcatgtgatggggcaggcagatgatgggggatgcagggaaggtagttttaaagtgcatgtttaatataacaattttatgcttagaaaaaactgtcattttcatgtttcagactacatcagggtacatttttatgttaaaccaaaggaatcatgctggagatctactgtacaatacagggcctatgattgacaatccgatgtggtatactgaagcatttgctaagaggtctatcttatgttaagtactctttccacaaaagggaacaaaacaaagcaaaaggggtggaaggaaagttctgggagtggtggctaagttcatggcattgataagtgatggtttgatggtttcacaggtgtatatttaactccaaacacatcaagttgtatacgttaaatgttggtgactttttgtatgtcaatcatatttcaataaagtgggttttttttaaagagggaatcatgcatgacatatactttaaaagcttgagaaataccggttcaatgctcattgctagttgacaacccagtagggtgactatcgttaacaatacattgtatatgtcaaaatagctagaagaaaatatttgaaatgttgccgacacaaagacatgataaatgttcaagctgatggagatcctaaacaccccgacctgattatttacattctatgcatgtatcaaaatatcatgcgtatgtcaaaatacatacaagtattatgtatcaataaaaaatgaaataaagcattgctagaaggaaaaaagtaccatttaaaaaaatctcggccgggtatggtggctcacgcctgtaatcccagcactttgggaggccgaggcgggtggatcatgaggtcaggagattgagaccattctggctgacatggtgaaaccccgtctctactaaaataaaaattaaaaaatctctacccatgagcctctttccacactttttataagtgccaccagatatgtagtgttcatagcatttatgaggttccaaacaatactatgtcactagtgtatgaagaactttattttacagtaataaaaatgttagaaatgccttaattaactgaaataaatggaaacatttatcacataacttcttttttcatttaatttgttaaagttttattttagatgcagaggtacacgtacaggtttattacatgggcataccgtgtggtgctgaggtttgggcttctaattgtcttgttgcccaagtagtgaaaatatgtttttcaacccttgccccactccttcccccactacgtaacttcttatgtgataaaatgtgaataacataacttatttttgtttccttaattttgtaggatggcttctggaaacttacaccagaactgggacttatattaaatcttaatacaaatggtttgcacagctttcttaaacaaaaaggcattcaatctctaggtaaggcactatgtttccatttattaagtcattattttcattcattaataagcatgctcctaattgttgtaaactgttttgtaagctagtgtattaatgtaataattatgaaagttatattcgaatggaattatatttaaccattaaaggaaatgggagatgggtttctagtcatatttttaccactaattagggtattatctgagcaaatttattagcataaatagcaccaagtgctgtaaaaaaaatctcagaagcttaacatggtaatcaaagattacttttttgtccgtatcacagtcaagtattggtcaggaagaaagttccacttatgtggtcatttagagaccttgactccttccatactgtggctccaccatcttcaatatatgtctttaaaattatcctggtaagagagaagaacaaagattaccctggcatcatccccctgctagacaagaggaagaatactagtcacatagccccatccatgtacgaaggcctgagaaatgtactgttaagctgcgtgtccaggaggagaaaagagctctgatgagctcctagccagcctctgccagaggcagttgttcaacctctggacctgtttcctatcatgacaacaaggggatagatgaggaagtcctgagcatccttgacccagcaagtggtttgaaggtcaaatgctagccctaggacaggagctgttgtttgtttgtttgttttgagacaagatctggctcccttgcccaggctggagtgcagtggtactatctcggctgactgcaacttctacctcccaggctcaagggatcctcccacctaagcctcctgagtagctgggactacaggcacctgccactatgcctgactaatttttgtattttttggtagagatggggttttgccatgttgtccagtgtggtctcgaacttgtgagctcaagcaatctgcccaccttggcctcccaaagtgttgggattacaggcatgagccaccatgctcagcctggagattttttttttaaataaaatacacattattaaacaactagccaatattcatggatagatagagcagcagcgtctcactgccccaccatcacctctaaaatgccagagttttcatattccaggctgggtgggtgggcaaatgcatagcctgtttgacctgcactaggccaaaaaggggtgatgacaatttacgtgaggagtgagtgcttgatcctggaataatagaagagcctctatctgactaactctcctgccaataacagttattaactttgaataaaatatttaaaaccattctttgaaggccaggagaataatccaaaacaggcagaagctagagtgaacataatctttgaaagaaagaaagccaactaggtgggctccacacgtatccagcttgtcacctaaaggcatttctcagctcatgagacacaatgggatgtttgaactaaaacagaaagtcttaacgggatgaggacatggggttggagtttaaggttgccaaagtggctggaagttaaggattaaaatcctataaaggagggaaccacagagcagggaactctgaaatctgcatccagataccccgcagatccttggctgtctcctaacctctacatatacaggtgcaacctcaaggaatccagaaaaaagcaacagctgggaagctacagagctaagcagagatttcagctgctgcctagtactggccagagtttagagttcaagtggcaccaaattagagagactttataaatatctttccattgaaaccataaaagggtcataaggatcatatctcatgatcaaggactataccccaggacatagggataagccaaaatagacccatcctaataaagcctaaaacaaagcctacacaggacctaccagaacaaaactgaacattctttagagtaagatagcatagctgagagtctctacaaggcgtcatttttaatgttcagtatggaatgaaaatttaataacatacgaagaagcaggacaatatgatcatgatcaaggggaaaatgggctataaatgctgacccacagatgacccagatgttagaattagcagacacagactttaaaactgctattaaaaatatagtgaaggattgacttaccagaaaaggatggaatgggtgaatcgcagaatctcagcaaatagatggaaactataaagaaaaaccaaattaaaatcctagaactggaaaatatagtatctgcaatgaaaaggtcattgaatgagcttaacaacagaatggacagaacaggaaaaaaatcatttaattcgattgacaatgcactcaataaacttacctaaactgaaatatagaaagaaaaaaaatagaatgaaaaaagaacagaggagccaagactgtggaatgatatcaaaaggtttaacatttgtgtaaccagggtttcagaaggtgaaaggttagatagaaaaatatttgaacatttttgtaaaattgatcaaagacagcaccttccagatccaacaaactcagcagaactccaagcactataaatacaaaaatgaccacatttagataggccagagtcaaactgttgaaaaccaaagataagccaggcacagtggctcacaccagtaatgcctgcactttgggaggccaaagggggcagatcatttgagctcaggatttcgagaccagcctggccaacatggtgaaaccccatctctacaaaaattagccaggcatggtggcgtgtacctgtggtcccagctacttaggaggctgaggtgggaggatcacctgagccctgggatgttgaggctgcagtgagcagtgattgtgccactgcactccagcccaggtgacaaagtgagataaaaattcaagataaatatattgtcaagtgaggctggagctcatggaagaggtcagaattggaaaagactgggaaaattctcaacgttagtagtatttaaagcctggctctggatgagatcacccaaagaaagaaggtggactgagcagagcaggtgctaggaccagcctgctgcacagcagggtttagtgttcagactggacaagaaacagcaaagacgctgagaaggagcggcctgagaaacaagaggaaaactggagaaaattgagtcacagatgcaaggggatgggatttcacagatgtgccttatccatgggcttttcctgtgtttcactgtattgctccctattatctgtgttatttttctgtaagcgtgtgcttttctgccttccttcttcaacgtagagtctcaagctgtcttttttctctgacttgtttttatatctctgtacccaactttgtcttttatcctcttcttcatttctcttttatcatcccctctccttctgaatttgttttttaaatgacgctgatacacattaggtatttcatcagtttattatttattatattattcttggagttgtatgttgcttattattaatattgcttaaaaattagtctaacattttgtaaataatactcaaaaaataagccacaaaagaatccagcaaattaaactgcttttgtctccactgattttcttttgtgggacaatggattggttttgttattttgtttttaaaaatgtattcaattcctttttcctctattaagaacattatattatttaataaaagcccacttacgagcagttttggctacctcaacgatgtaaaattaatggtgtatatgcagatatgtacatactatgccaagtccttttgtctttactcaaaaaaagtaattgtatattcttaattataagacaaagatttgggtttttcttttcttccctaaaaccattttttggctatgtgttgtggctcttgcctataatctcaacactttgggaagccaaagtaggaggatcacttgagtccaggagttgggggctacagtgagctctgatcacacccactgcactccagcatgacagagtgagcccctgtcttctccaaaaaaaaaaaaaaaaagaagcttggatttttaaaatgaaaatgggttgttaattgagttcaacacatgtaaacattcatttttcaattttgatatttcataatatagtaaaatatcttggatacctataggtactaaccactagaaataatttgatacaccagtgtaattagtcatatctgttgtttatctgttgaatatttaggtttactcttctaagctatttgtaacaggagcctaaaaactggatttcttttagtgaacttcatggctctttggttattgaagatggcaagtgaggggcactctggatacagttcagtttcctgacaatgatcaggataatatcataggcacacgggtctaactgtcctcattttttatttaaacagcaaaccatttaaggaccttgaagagtattagagtttcacgatctgctcatgtactgtgatttaaccgtattataattcttttttttttttttttttttttttttgagacagagtctcactctgtcgcccaggctggagtgcagtggagtgatctcggctcactgcaagctccgcctcccgggttcacgccgttctcctgcctcagcctcccgagtagctgggactacaggtgcctgccacccccggctaattttttgtatttttttttttagcagagatggagtttcattgtgttagccagatggcgtattgtaattctttaatgagaattttataaacaggcacagtttgagatgcagagtttccaacagacttaacggagtttttttccttttaggtgtaaaaggaagagaatgtctcctggacctaattgccacaatgctggtactacagtttattcgcaccaggttggaaaaagagggaatagtgttcaaatcactgatgaaaatggatgacgcttctatttccaggtggctttaactatagtattatgcaacttatttatattttcaactatttatttaataaaccttagaaacagctatagggaattatcttacatgtgtacactataagtatgtagcaagagaatttgtttgcaggtgacagcttgcccatagtctcctgtggcgggcagggctgatgtatttgtgccttgggctgcacaggaaatgggctcaaagagtttcagtgcagctcccgctggaggctggcgcttctgggctctggatgtggtactcttcactgcagtctgctgatcctgggtgcctccagaagacccacaatgtgactgttgggcccagccctgttcccaacaatggcagggcctgggacaagaatacaatacaagtatttaaagtttataactttgtagtttataacaagtgtttaaaggttataaatcaaactagcaaactattagattaaatgtgttctaatctcctcccttggcaaatacaacttcataaccacctggaaggccaggttcaaattcggcccttggttgacccccagcaccctaagagggtttgcctgcaaacgtgaataccccaccccacccatcaaaatgccatccagaccccatgccagtgccccctcacaccagccaccttgtagcaccagtgagatggcaacactgttcaaactcaggatgacagaccagggaagaccctggaagtggactcagggccatgtggtcagggatgctggagttgcagggtctaaaaaggaggatatgggctctggggtgggcatattctcttgtccctacagaccccccaccccatggcaagagggtcaagaccagagtaggatccctctgagatatatagatatagatatagatatagatatagatatagatatacacacacacacacacacacacacacatgcacacatgcatacacatatacacatatacatacacatgtaattggcttatgttcttttaaaggcaagataaggggaaaactaatcaaactaataatattattgctacggggatttgatagaggggacaaagatagaagctaggtttctcctagtgtgctttgttttgcagttttgactttggaactgtgtaaatattttacataataatgcataagattgatatttatttatttatttattgagacaaagtctggctctatcgcccaggctggagtgcagtggtgcaatctcagctcactgcaacctccgcctcctgggctcaagccatcctcccacctcagcctcctgagtaactgggactacaggtgtgcaccaccacgccctgctaattttggtatttttgtaaagaaggggctttgccatgttacccaggcaggtctggaactcctgaactcaagcaatcctcccgcgtcagcctcctgaagtgctgggattacagacatgaaccactgtgcccatcctgggaattaatttaaggtgaatttaaaacatagtactggccgggcgcggtggctcacgcctgtaatcccagcactttgggaggccgaggtgggcagatcacgaggttgggagatcgagaccatcttggctaacatggtgaaaccctgtctctactaaaaaaaatacaaaaaaaaaaaaaaattcgccaggtgtgatggcgggtgcctgtagtcccaggtactggggaggctgaggcaggagaatggcgtgaacctgggaggcagagcttgcagtgagtcaagatcgtgccactgcactccagcctgggtgacagagtgagactccgtctcaaaaaaaaaaaaaaaagtacataatttgactatatctctctagtgggatagtacctaaggattaaaaaatattacaaagaaatctcactgggagtagtcatggtgttaataatacttttgatttgttattttggaaggtagatattaatattgttagaaactaatatgtataaaatcaaagaagttaaacaaaaccccttgatttctaaacttgaattagatcagagaatagaggaacatgttacttgacaccatggaaatgcagtcagcgaagtctggaatgtggggaaataaatggcaagagaaaaataaatggcaatagaaaaaaaaggttgaggagcagaacctgtaaataaacctttagagacatatcaaccaaaagcaagggtagaccttgtttaggtcctgatacaaacaaaacccactgcatttaaaaaaatgagataggaaaaattaaacactacctggatattttatgatattaaagaaatattgataattattttttaagtgtcatgattaagaaaaagttctcaaacacaaaacaggtgttcaggaagttctgggctaggcaaattggctcatgcctataatccaagcactttaggaggctgagacgggagggtcacttgagcccaccaagatcaagcccagaagtttaagaccagcctaggtaaccaatgagactgccatctctacaaaaaactttttgtaattacccaggcattgctgggcacggtggctcacacctgtaatcccagcactttgggaggccaaggcaggaggattgcatccaggagttcaagaccagccttgaccacatagcaagaccctgtctccacaaaaaaatttaaaattacccgagtgtggtagtgtgtgactactcaggaagctgaggtcggggggattgcttgagcccaggaggttgaggctgcagtgagttgtgatcgtgccactgcactccagcctgggcaacaaagcgagaccctgtctgaaaaaaaaagaaaatcataatttactatatgtaatttatacttccattttttaaaaagcaataccttctcattagtttgccaagaaagatgagaatttattttgtttttctattttgggagttttctttttttttgttttgtttttatttatttatttattttttgaggccagatctcgttctgtcacccaggctggcgtgcagtggcacgatctcggctcactgcaacctccacctcccagtttcaagcaattctcgtgcctcagcctcctgagtagctggaattagaggtgtgcacagctaatttttatatttgtggtagagatgaggtttcgccatgttggccaggctggtctcgaactctggcctcaagtgatctgcctgcattggcctctcaaagttctgggattacaggagtgagccactacactagcctattttttgtattttattttaaaataaaccagtgccacttgccaagaggattaattaaataaatatcaaagaaaaaacactttgaacagctaggaggtgggactaaaaaattagtattgacttaataggcacatccaaagacgcatttattctatttagatcattgccaattattaatattatagctgttaaaacaagtataaactttgaacctgcttttgaactgtaatatcataaagtaaagattttcaaaattgatcaagtatattccagcatattgctcttactccattactgctactgtgctagcaaaatggtttgttggcacttgagtacataagacaaacaattttaggccagacacggtgactcacagctgtaattccagcactttgggaggttgaggcggacagatcacaaggttaagagattgagaccatcctggccaagatggtgaaaccccgtctctactaaaaatacaaaaactagctgggtgtggtggcacgtgtctgtaatcccagctacacaggaggctgaggcaggagaatcacttgaaccaaggagtcagaggttgcagtgaaccgagatcgtgtccctgcactccagcctggcgacacagtgagactccatctaaaaaaaaaaattaaatattttttatttcctgtttattgcatatttgaaactttgttctatattttctatttcaggatgtacataacattgatgcaagagcacattatatgggggtgtaggcacaagattttcttgctagcggaatgtgaaccaaaaagtgtagaggccaatcagtaaaaatattcaaagccagttttgttgttttcagcagttagtaactatcagtagatgaatatttactaggaaacattggtcttttaaccactttgggcatgcttcttatttagtatgttcatcatgatttagtatcatgacattcagcgaacatttattgagtgcctactgtgcactagggactagtaagcatgttaagtttgtaagctttgttgatttccaccacaaacccataggacctcaggttattctcataattgaggaaactgagattcccagtgttgaatgaaagccacacagtatcacatggccaatatcatgtgattgcagagtcaggactcaaacccagctcttaaccaccacgctatactgacggccctttcccagttcacagggaaaattcaggaacagggagagaattttcaaaatattaagtttccccatagaattttctgaagaactttggtatatgttgccccttgttcactaacaagttctagcagatgacagaacaaatgaggaagtagctaattaatattaatgaacaacctcagaatttttctgagtgttgaatagacttgaatattcaacagtctcaaatatttgacaccatttagtggacacagacttgactcgatatgcttattctaccaagttgttcctggtttacgtgacacaactgaatgtatgccagtttcatgggggactctcagatattctgaaggtacctaatcaagtcagtacagtgggaaggagagagaaacagaagcctcatttgtgaaatagtacttgagtttgtgcgtgaagaatggataggatttagactgagaagcgtggaaaggggacaaccataaacaactgtagagcggctggaacgtgagctgtgctgcaggcagcagggatgcctggaggcacgtggaagccaggaggtggcgggcacagggcacttgacaatgcagtgcataagctcaaggtcagacgggcagaagaacttccgtaagatgccaaggaaaactgcttttattaaatatcttaatttttggcagaatcattttgtctgatataatgtgatgggtttagtaccacattacatttcacatgttatattctgaaatctgaaacttttttttttaatctaggaatattccctgggcttttgaggcaataaagcaagcaagtgaatgggtaagaagaactgaaggacagtacccatctatctgcccacggcttgaactggggaacgactgggactctgccaccaagcagttgctgggactccagcccataagcactgtgtcccctcttcatagagtcctccattacagtcaaggctaagtcaaatgaaactgaattttaaactttttgcatgcttctatgtagaaaataatcaaatgataatagatacttataatgaaacttcattaaggtttcattcagtgtagcaattactgtctttaaaaattaagtggaagaagaattactttaatcaactaacaagcaataataaaatgaaacttaaaatatttc

SEQ ID NO: 1032 - DNA, 299 bp, Homo sapiens
gcggtggctcatgcctgtaatcccagcactttgggaggctgaggtgggtggatcacgaggtcaggagatcgagaccatcctggctaacatggtgaaacctcgtctccactaaaaatacaaaaaattagccgggtgtggtggtgggcacctgtggtcccagctactcgggaggctgaagcaggagaatggcgtgaacccaggaggcggagcttgcagtgagctgagattgcgccactgcactccagcctgggcgtcagagcgagactccatctcaaaaaaaaaaaaaaaaaattgtagag

SEQ ID NO: 1033 - DNA, 397 bp, Homo sapiens
cagaagtgacattttctgcatccacctatatcctacccagaaacagaactgcaatcccactctattaagtggcagtgtctcaaatgaaccccaggtgtttatacatacatttcttttaagggctagcactattaagtatttaataatcatctctttattgtctgtttccatcctgtaaatggatgtctttgatgtcaaaagtaataatttaacctttaagcctaaattaatcctaatctaaatatacaaaattttcatgatggggtggtcaactagaatggtgaacatagttggggatgttgagaggatctctgcatagttatcagaaaaaaatgtatctagcctcttttttctgccctagctagtcatggggttgccaccttatatagctattatc

SEQ ID NO: 1034 - DNA, 439 bp, Homo sapiens
attgagactacaggcatgtgccaccacacccagctaattttggggtgtactttttgtagagatggggtcttgctctgctgcctaggcttgtcttgaatttctgacctcaagcgatcctcccacctcagcctctgaatgtgttgggattacaggcataagcctctgcacccagccggtgtttcagagttttaaggtgatgagagatgcttctggatagtcctgggagcctgtgtccttctcacattcaggagtccagtggaaagctggctcagctggactgagcaatctgagaagaaacatgatcttttgtaggggatctgtcagggtggtgggagaaattataaaaattaagttgtaggaaacagacacaaaacttcttggaaggccaggaggtttgcatagcttcagtaaaagatttggctgaaggcagctgaattct

SEQ ID NO: 1035 - DNA, 439 bp, Homo sapiens; identical to SEQ ID NO: 1034

SEQ ID NO: 1036 - DNA, 397 bp, Homo sapiens; identical to SEQ ID NO: 1033

SEQ ID NO: 1037 - DNA, 547 bp, Homo sapiens
cttcaatttgacattcaatgcattcacatcagaaactaagaagataacaagcctgagatgtcaggtgataaaaattcatgtttcttccaaggacagaaggctattagattgtcccaggccatatctattcccagttctttgtgagtagtcttcttactttttctgtggtaggtaagaagcatatttccaccaaaagaaagcatgcattgtttgactagccagctttctagaaaaaatgagatccttgagaggataaacaaatccaacctattcatggtgtcctcacttattgtggtcaatttggaaggcttaaaacacaaaaaatgggatggataactttgaacactaaaattagtggagccaaaggcacgtcttcaccattctgttatgtgacttaaaattcaatttcacgaaacccacttccacaagcttaatgaactgtgagctacatgagggcataaaccatgtcttctttgtatggtatttctgcttcctagcaggacagctggcaaagagtttatcattaaatgtttgctgaattaatgaa

SEQ ID NO: 1038 - DNA, 547 bp, Homo sapiens; identical to SEQ ID NO: 1037

SEQ ID NO: 1039 - DNA, 547 bp, Homo sapiens
cttcaatttgacattcaatgcattcacatcagaaactaagaagataacaagcctgagatgtcaggtgataaaaattcatgtttcttccaaggacagaaggctattagattgtcccaggccatatctattcccagttctttgtgagtagtcttcttactttttctgtggtaggtaagaagcatatttccaccaaaagaaagcatgcattgtttgactagccagctttctagaaaaaatgagatccttgagaggataaacaaatccaacctattcatggtgtcctcacttattgtggtcaatttggaaggcttaaaacacaaaaaatgggatggataactttgaacactaaaattagtggagccaaaggcacgtcttcaccattctgttatgtgacttaaaattcaatttcacgaaacccacttccacaagcttaatgaactgtgagctacatgagggcataaaccatgtcttctttgtatggtattcctgcttcctagcaggacagctggcaaagagtttatcattaaatgtttgctgaattaatgaa

SEQ ID NO: 1040 - DNA, 1154 bp, Homo sapiens
actaagactggagtcatccagaggccccattaggacactgacacagggggaccttgccccctatccatgtagcctcagagcatctgcatatgatctcttcagcaggacactgcagagatttctctcatatgagcccagggctcccaaaagcaattgtctcaagaggaggaaacagaagttgccagtcttcttaaaagctagtcatagaactgactttgcatcacttccaccatgttctgttggttaaagtcatagaccagcttggagttaatgcagaagaggactacacaagggcatgagtgccaaagtgtggtcctttggggttcatctttgacatttgccacctcaccatgtttttaaaaagaaaattagattacataaaacaaatagatgggctggatgtggtggctcacacctgtaatcccagcactttgggaggccgaggtgggcagatcacttgaggtcaggagttcaagaccagcctggccaacatggtgagacaccgtctctactaaaatacaaaaattagccagacatggtggcattcgtctgtaatcccagctacttgatgcgaaggctgaggcaaaagaattgcttgaacccaggagatagaggttgcaatgagccaagatcactccactgcactccagcctgggcgacagaatgagactctgtctcaaaattaaaaaacaaaaaaccaaaaacaaatagatgaaaaagtagactggagacaaataaaagtgagtttctaaaggaaattcacagtaatgctgcattaaacactaagctcacttaggtcactttctagtgagctaaccgtaacagagagcctacaggatacacgtgagataatgtcacgtgtagaagatcgttgtgaattaaagttcaaaattaagacttcttagattatgatgtagattttagagctccttaaaacataaagcgaatcttataaatgttcaattctaaagttattccacttggaaaaattagcttttgggacaatttttaagaacttttgtgtaaaatgcagctccatgtttagcataatctaaaaataatttcaagcaatccagaatcttccaagaatttattaaagctttaaaacaaagcaaaacaaaaagacccttttgtgccttatatgggaagactcc

SEQ ID NO: 1041 - DNA, 2106 bp, Homo sapiens
acatgcatttcctgtttattgtgggccagtactcttcaaatattttacctatttaatcctcataatgattttgtaggtcagtattaatatcatccccatcttaaagatgaggaaattgggacacagaaaggttaagtaagttgccagagtcacctagcagaacttccctttggagtagactattgtttaccaaaagtgacctgatagaagccaaggactcttccctcctttcctcaattttacttccaactcaccaactacattacacagcactctgtatttcttttgcattacatggtgtggttccttttgggaggagtggggaagaggtaatagtacactagaaagggtgagagctttgtggaattatcttttagcaaggaatagcttaactgatagccgaactgcaggcaaagggaggataaaagcacagaagaaaggcagatgagagagtaaaggaaaccttaactgtcttcccaatttggcctagggaatcagtccccaacctttcagcaccagggaccagttttgtgaaagacaatttttccacagatgggtgagacaggggatggtttcaggacgaaactgttccacctcagatcatcaggcatgagattctcataaggagcatgcagcttagatcccttgcctgtgtagttcacaatagggttcacactcctatgagaatctaatgcctctgctgacctgacaggagggggagctcaggcagtaatgctccattgcccaccactcacctcttgtgtacggcccagttcctaacaggccatggaccagaccagcacctgtccacagcccaggggttggagacccctggcctgggggcagcataggtgagcatccccactgaaaagccccatccagggtggatcagttgcacactgtgacaaagactcaagggtagcaggtagctcagttgcacaatgtgacaaggactcaagggtagcagttctcgatgctggcgacaggttagaatcacctgtcaatgatcaaaaactaataacaaccaagatttctgggccccaccttttgatttaattgggttggagtagagctctggcattgggtggttgagttttttttttttaagcttccaggtgaatctatcacacagctaagtttgaaaattacagctttagcaataagaacattctattttaccagattatatcaccttctagctataaaagaaagaacttctgagatagttttttaaagttaaggacattaggcctggagcttcacaaaacagtaagagaaatgttcattttgtaagtaattttctgagaacaccaatcctacagttaatctcgaatttgttcagggcaatgtacggccatcataaaaccagctgttgctgataaaagctataaaattcagcctagaggtaaagctgtcaattttcttcagctgaaaatctctccagctttggaaagaaaataggcttgtctaggactaaattcatacttcctcttgtgaaaataatattttccttcttgctctgaatttttcattagaaagagaaatatctttttttgcttgaatacttttggaaatatatttttctcaattttttttcaggcagagtgttgtttttcatcacgtacttattttgatgataattcagagttactatactgggatttaactaaacgtaacttttgtaggagtcacctatgaaatagacttgtgaacaaatggataatgttttctgcttacatagagcctttaaaaacagaaaatagaaccccagctctttgtgcccctccctttcttaccacagaaacataatggtcatcaaattataattaacatcaactattttctgccttgaataaacaataaaagcctatttccacatattactgcaaaacctcaccaatttagattgctacagggaaggcttcggagaaagtatgctaaagggtaggttatggaaggtccgaccattaaaaatctgaattacatctcattttaagagaaatgctatttcattcaagtacagaatacacaataacacaattggaaactaagtcaatagttaaggattttttaaagatatgtactttataataagtctgcaattca

SEQ ID NO: 1042 - DNA, 1154 bp, Homo sapiens; identical to SEQ ID NO: 1040

SEQ ID NO: 1043 - DNA, 1008 bp, Homo sapiens
actaagactggagtcatccagaggccccattaggacactgacacagggggaccttgccccctatccatgtagcctcagagcatctgcatatgatctcttcagcaggacactgcagagatttctctcatatgagcccagggctcccaaaagcaattgtctcaagaggaggaaacagaagttgccagtcttcttaaaagctagtcatagaactgactttgcatcacttccaccatgttctgttggttaaagtcatagaccagcttggagttaatgcagaagaggactacacaagggcatgagtgccaaagtgtggtcctttggggttcatctttgacatttgccacctcaccatgtttttaaaaagaaaattagattacataaaacaaatagatgggctggatgtggtggctcacacctgtaatcccagcactttgggaggccgaggtgggcagatcacttgaggtcaggagttcaagaccagcctggccaacatggtgagacaccgtctctactaaaatacaaaaattagccagacatggtggcattcgtctgtaatcccagctacttgatgcgaaggctgaggcaaaagaattgcttgaacccaggagatagaggttgcaatgagccaagatcactccactgcactccagcctgggcgacagaatgagactctgtctcaaaattaaaaaacaaaaaaccaaaaacaaatagatgaaaaagtagactggagacaaataaaagtgagtttctaaaggaaattcacagtaatgctgcattaaacactaagctcacttaggtcactttctagtgagctaaccgtaacagagagcctacaggatacacgtgagataatgtcacgtgtagaagatcgttgtgaattaaagttcaaaattaagacttcttagattatgatgtagattttagagctccttaaaacataaagcgaatcttataaatgttcaattctaaagttattccacttggaaaaattagcttttgggacaattt

SEQ ID NO: 1044 - DNA, 2106 bp, Homo sapiens
acatgcatttcctgtttattgtgggccagtactcttcaaatattttacctatttaatcctcataatgattttgtaggtcagtattaatatcatccccatcttaaagatgaggaaattgggacacagaaaggttaagtaagttgccagagtcacctagcagaacttccctttggagtagactattgtttaccaaaagtgacctgatagaagccaaggactcttccctcctttcctcaattttacttccaactcaccaactacattacacagcactctgtatttcttttgcattacatggtgtggttccttttgggaggagtggggaagaggtaatagtacactagaaagggtgagagctttgtggaattatcttttagcaaggaatagcttaactgatagccgaactgcaggcaaagggaggataaaagcacagaagaaaggcagatgagagagtaaaggaaaccttaactgtcttcccaatttggcctagggaatcagtccccaacctttcagcaccagggaccagttttgtgaaagacaatttttccacagatgggtgagacaggggatggtttcaggacgaaactgttccacctcagatcatcaggcatgagattctcataaggagcatccagcttagatcccttgcctgtgtagttcacaatagggttcacactcctatgagaatctaatgcctctgctgacctgacaggagggggagctcaggcagtaatgctccattgcccaccactcacctcttgtgtacggcccagttcctaacaggccatggaccagaccagcacctgtccacagcccaggggttggagacccctggcctgggggcagcataggtgagcatccccactgaaaagccccatccagggtggatcagttgcacactgtgacaaagactcaagggtagcaggtagctcagttgcacaatgtgacaaggactcaagggtagcagttctcgatgctggcgacaggttagaatcacctgtcaatgatcaaaaactaataacaaccaagatttctgggccccaccttttgatttaattgggttggagtagagctctggcattgggtggttgagttttttttttttaagcttccaggtgaatctatcacacagctaagtttgaaaattacagctttagcaataagaacattctattttaccagattatatcaccttctagctataaaagaaagaacttctgagatagttttttaaagttaaggacattaggcctggagcttcacaaaacagtaagagaaatgttcattttgtaagtaattttctgagaacaccaatcctacagttaatctcgaatttgttcagggcaatgtacggccatcataaaaccagctgttgctgataaaagctataaaattcagcctagaggtaaagctgtcaattttcttcagctgaaaatctctccagctttggaaagaaaataggcttgtctaggactaaattcatacttcttcttgtgaaaataatattttccttcttgctctgaatttttcattagaaagagaaatatctttttttgcttgaatacttttggaaatatatttttctcaattttttttcaggcagagtgttgtttttcatcacgtacttattttgatgataattcagagttactatactgggatttaactaaacgtaacttttgtaggagtcacctatgaaatagacttgtgaacaaatggataatgttttctgcttacatagagcctttaaaaacagaaaatagaaccccagctctttgtgcccctccctttcttaccacagaaacataatggtcatcaaattataattaacatcaactattttctgccttgaataaacaataaaagcctatttccacatattactgcaaaacctcaccaatttagattgctacagggaaggcttcggagaaagtatgctaaagggtaggttatggaaggtccgaccattaaaaatctgaattacatctcattttaagagaaatgctatttcattcaagtacagaatacacaataacacaattggaaactaagtcaatagttaaggattttttaaagatatgtactttataataagtctgcaattca

SEQ ID NO: 1045 - DNA, 1827 bp, Homo sapiens
gtagagatagggttttaccatgttggccaggctggtcttgaactcctgatctcaagagatccacctacctctgcctcccaaggtgctgggattacaggtgtgagccaccatgcccggccaaaaagaatttttttttttttttgagaccaagtcttgctctgtcacccaggctggagtgcaatggcatgatctcgtcttactgcaacctctgcctcccgggctcaagtgatactcctgcctcagcctcccgagtagctgggattacaggcatatgccaccatgccccgctaatttttgtatttttagtagaggaggggttttgccgtgttggccaggctggtctcgaactcttgacctcaggtgatccgcctgcctcggcctcccaaagtgctgggattacaggcatgagccaccacactgagccaaaaataatatttttgaaaaacgaatacaattacctattgcctagatttaacaatacttgctccttgctggctgctctactaggaaaaaaaaaaagagaaaagagaaaaaacaatatttgccatgtttatttatatttatttatttatttatttattgctgatgaattataaattctaggcatcatatttcaccccgaaaacttcagcatgcatctctgaaaagtgatgtctttctccatgaacaccctccattattatgtctgacaaaattaacaatagttccttaatgtcatctatgacctaagccatcgtcagatttccaccttatcctaaaacatctctctcacagctggtttgtttggttcaggatcccatgcaaggtcatgccttgtatctggctgtctcttcaatctcccttgaagagccccgccctttccttctgcctggacattgactcattgcctgcctgcaaggtgtttgtttgcttccttgcagcagtgttttcatgttcttctaaccctggtgttacgtgagaactggtaggcaggtctgcaaggtttaggctggtgagatcaacagggctcagtgacagatgaggcaaagccagcaggaggcaaggatgattctaccttgggtgacagaagtagatgtcactcagatgctgagaatggggagggaggagggagaggacaaatttgatttggggcacacagctttcaacatgtacaaaggacatccagatggcagtgggctatgtgagcctggagactgtgctgcgagttgttgatctacagccagtggggctgggctctcccaaggcggtggagtgagaagacaggtgagacaccaagcatgaggccgtggcggaggagatggagcctggggcccaactgctgagcagtagcagagaaaaagaaggaaaaccaggaggcctggcccgagaaagcccaagaaggagaggattttaaagagcaaacactggacagaagtcaggccagaggaagattgtcaggcctctaagccggagcaaggtccttgtaacccctgtgacctgcccgtatacatccaaatggcctgcaggagccacaaagtctggagcagccaaaaaaaaaaaaaaaaaaaaacccacaaaaaggagtaaaacagccagctccttgcattgtccctgccccaactcatcaattgaccttgtgacaatctcctcctggacagtgagtctcaggagctccccactgagcaccttgtgacccctcccctgctatcaatagataaccacctttaacttgtacctttccactgcctacccaagtcctgtaaagctgcccctattctatcccccttcgctgtctctctttttggactcagcccatccgcacccggatgtaaataaacagccttgttg

SEQ ID NO: 1046 - DNA, 559 bp, Homo sapiens
caaaagccacactgccttctccctggggtcccatgatgggccagcctgccccagggttcccctgggagcctccacctcagacatagcctctcacctgtggcagccaggtcccacccacccactgccccagcctctgcttgactcaggcagtagtagcaggtcacagttgggagcagaggggaaacagggcgtgtttaagtggccttattcccagaatcctggctccagagctgtgtctgaaagggagaggaactacttcgtctgtaatacatcgggggcagggattgctggaagagcaagtctgtttccaggtgagaaataatgaacaactttttcttattttcttttttgagacaaggtcttgctctttcacccaggctggagtgcagtggtgcaatcacggctcactgcagcctcaacctcctgggctcaagcaatcctcccacctcgtccttccaagtagccgagagcacaggcttatatggtagtgacagtgaggatggagaatagtaaaaatgtttgaggaattttttttttaattttatttttattatgaaaa

SEQ ID NO: 1047 - DNA, 15037 bp, Homo sapiens
gtctaagtgaggggacagagaagttggctcgaaaaggaggaagggaaaaaggatttagttgttaaaaggggatgctggatccagggaacaaactttattttattttattttttttttttttgtgatggagtctctctcttttgcccagaccggagagcaatggtgtgatctccgcacactgcaacctctgcctccagggttcaagtggttctcctgcctcagcctcccaagcagatgggactacaggtacccgccaccacgcccggctaattttatatatataatatatatatatataattttatatatatattttatatatatatataattatatatatattttatatatataattatatatatattttatatatatatataattatatatatatatattttatatatatatataatctgtagaaatttgtagacctatttttgaattgtattttctctatttccaaagctgtagtaggtaacaagattaaaaacattaggctttctaagcatagttgcatacccaaatttcagtcgaggcatataaatgctataaatggctgatacactttcttactacatgaccagttttattctacatacaattctaaagaattaaagccttctttacacatatgagtaggctattttgggttttatggtttattaaagaattatcgatgattcactgctcagttctagctatgatcactccgggtgaacctgcagctaaaggacgaggcttacccattgatagcagaacactgtagataggacagcatggcgtcccagctctgatcgtgaatcagatcatgggatcagagctaggactcagtatctctgcccttcagctagccatggtgacaggacgtggccccaactgtgtctcccagattcaagaattatttgcagtgtaaatatgtacgaataaatgatgttcttaacatcacagcgattgcttaaaagtagtggctttcatacttctttttgactctgaccctcagtcaaatacacattttttcatagcagcccagtatacatattcaaaagctttctgaaagactgttttaccttattatgtgggaagcactctgatattttctgtgctagcctattgcattacctttttttttgagacggagtctctgtctgttgccaggctagagtgcagtggtgcgatctcggttcaccacaacctccgcctccctcgttcaagtgattctcctgccttagcctcccgagtagctgggactacaggcacacgccaccatgcccagctaattttttttgtatttttagtagagatgaggtctcactaccttggccagggtggtctcaatctactgacctcatgatctgtctgccttggcctcccaaagtgctgggattacaggcatgagccactgtgcctggctgcgttacattttattttttaaaaagctgaataagacccactatttatttcatagtcactaaagagttgggatcaactgtttgaaaatactattttgaagtatccatgaggtcttacactatagctggaatgataaaaggacccaaaagagcgtttttaggaatatattttgggggggagaatacctgtgatgcccttctttttcccttaggtataaacttgaaaagcttgttataaacttgaaaaaatggtaggtgagtaatttatatgtatggtttcatgtgtatatttgaaatattaatatatgaaagcagtgaataatagtatctgacacgtaataggtacttaatatgtgttagttttctttctgcaggcatatcttggttgtgtaattgtaaacaattagctttagcttttaacttagcttttagacttcaaaagttctatcataagatttatcttaacttactttgagtgattaattttaattattgaaagacagttgattggatacaatttacatctttggctgacataaataatgcagtctttttatttttttggtcaggtactggtagttaactctcaaggagaaatttcacggttgagcaccgaaaagaaagtggtcatgaaaggaagtatcaacaattatcttaaattgggtcaagaagggaagtatcgcgtctaccacaatcaatactccactaattcatttgctttgaataagcaccagcacagagaagaccatgataagagaaggcatcttgcacataagttctgtctgactccagcaggagagttcaaatggaacggttctgtccatgggtccaaagttcttaccatatctactctgagactgactatcacccaattagaaaacaacatcccttcatcctttcttcatcccaaccgggcatcacataggtaaaggaaactaaggttaatttattgctgtaaatatactaaatgtttataaaatgattgttgtagttgtgcacttgaaaacgtcattaccaatgagttgaatgaagtcaatgtggtcagcagacaggacgttagaggcatgagtgtacttctaacttactgaactgacaccactaactatttggaggattcctaggagtcagaatctttattcctggaatcagatggagaccaaagttacaactattatgcttttaatttagatcaacctagtgaaataatttctttcatttcttctgaaatacagggcaaactggatcaaggcagttcagatgtgtagcaaactcagagaatttgcattggctttagccattttggagtgtgcagttaaaccagttgtgatgctaccaatatggcgagaatctttaggacataccaggtaagtgaattctgagccttgtaaatgatgaatattggactcgcttttgaaatactagcctattaatcatgaaagttaatgtatttaagaggccatattaaagactttacttttggctcagtttcttcctatataagttgtaaacatgaatgaatattattagttctttctttctttctttttttttttttgagacggagtcttgcactgttgcccgggctggtgtgcagtggcacaatctcggctcactgcaacctctgcctcctgggttcaaatgattctcctgcctcagcctccgaagtagctaggattacaggtgcccaccactacgcccggctaattttttgtccgtcaacccaggctggaatgcagtagtgccatcacagctcactgcagccctgacctccctgggctaaggttattctctcacctctgcctcccgagtagttgggactacagacgcattccactatgcctggctagtttttgtattttttgtagacacggtgtctcattatgttgcccaggctgttctcaaactctaggctcaagcgacctgcctgcctcagcctaccaaagtgttgggattatagttgtgatacatttctgatacgagagcaattagtacaatggttgctataacattttagagaatggtttgacaaaaccaaagttaaaaatgcaatttgactccttctcgatatggtagagaaacttttaccctgtgtacatgagaagacattgtaacagggtattccttataatattatttcataatggtgaaatttggaaacaattcctaagtactcataatcaggcatgtttaaattgtgtcatcatttcataatggactgttacatagcagtgaaaaacacactagagcaacaagtgtcgagattgaatctcgtaagtttacaatagaaggaaaacatttggagaggctgggaggggcataagggttgaaaaattacctgttgggtacagtgtttactctacgggtaatgagtaactagaaacccggttcccccagtgcacatagaccccttgaatctaaaataaaataaaaattaaaaaaaaaagaaaacagttccatcactaaaaatacataaggataaatgtatatactacatacatttgtgtagcgtttaaaagcatgtgtgataacacaatgttacagtattgtttagggatacagacatttgtaaaattttaaagaaatgcaagggctatatgcttgaaacataagaaatacacttctaaataaataagaagtgctcaaatgtaaatcataatgaaaaccagaaaacattttgatctggatgttcatgaaagtactacatatattgaaatttgtgagatgcagttaaagacttcctaggagaagttgctagcctttaatgcttatgttagaaaagaaaaactgcaaattaattagctaggggtacatctcaaggagccagcctaaagaaagaaaatattaaagatgaccaaatgtgatgaaatagaaaacaaacatactttagatcccattatgttttacaagcctctgataagattatcaagggggggaaataatacagcacaaataaccaatatcaagaataaaaaaagagacatactaaccaacatttctgattctcttttactagaacttggaattttaaagccttcacagggtctactaacatagtattcaggtttcctacatctacaatgaaaggggtccacctagaaggagtggagcaagatggtggaatagaaggccccaactcatcgtgccccaccttccatccccacagccacagaaagggacccaccgagctccctttgggtggggggaagggttgagaaggatgccacagtcatctcagtccttaataggtcagaagccacactcttaggcaggaaaaggatttctggttgtttatcactgcacctgtcattaaggtgatggcaggaccaaatgatttcataaggtttttcttaaattttgggaaccagatagttccatttaaacttttctgccagaatagaaaaaggaggaaattttacagattattgtttctgttagtgtgaaactgttagaaaacttgataaatagaaatagacaaattaaaaattatggccctgtctcctttattaatatttattattaataattaatagcaaataggtgtgtctataagaaatctcaaaatattggtatgcagatctattcaggagtaaatttaaagaataagaaaccatggctgaattggcttcaccttagacaccaatctccaatactaggagattactaataccatactattttaggaagtcaaagaaaggctggatgtggtggctcatgcctgtaatcccagcactttgggaggccaaggcgagtggatcacttgagcccaggagtttaagaccagcttggccaacatggtgaaaccccatctctactaaaaatacaaaaattagtggggcacagtggtacatgcctgtagtcctagctgctaggaggctgaggcaggagaatcgcttgaacccaggaggcagaggttgcaatgagctgagatcgcaccactgcactctagcctgggcaacagcgcaagacactctcaaaaagaaaaaagttaaagaaaggaaaccttttgatcatctcattagatgccaagaaggtatttttgtctaagttcattattatttattgggtttttttaattttgaattttttttggctgcatgtggtggctcacgcctataatcccagcactttgggaggccgaggtgggtggatcacctgaggtcaggagtttgagaccgacctggccaacatggcgcaaccccatctctactaaaaatacaaaacttagccaggtatggtggcacacgcctgtagtcccagctacttgggaggctgagggaggagaatcacttgaatctgggatgcagaagttgcagtgagctgagattgcaccactgctctccagcctgggcgatagagtgagactccatctcaaaacaaaacaaaacaaaaatgactactaggaagtttcaatttatatagcttgcattctatttctgatggacagccctgctctaggaagtctcagcccttcagatggaagggggacagttatccgttggctaaaactattccatagtgctgaaaacatgatgatatccctctagtgcacaggtgtggattcagtagatgcttgataattcagttcttatttggtactattattgacaaaggaaaacgataaaggaaatatttttctcttcccccatcttttagctttctccctttgtctcataaccatgtccaccaatgagaatgctaatacacaagctgcccatcttcacagatctaagaacaagggaaaggacagtacagtgagtaccttctgttgctttcttatggtgttatttaaatgggaagacatttggaaagggatgaaaacttagggatctttttaaaaatgtcctcacttagcaacaaaaactgatgtggtaggtgaaacagcatgttatcttttctcaaggaaacgaggcgtcacagaatagaggtcaatgtggagctgaggaaagctaagaaggatgaccagatgctgaagaggagaaatgtaagctcatttcctgatgatgctacttctccgctgcaggaaaactgcaacaaccaggtaaaaaaatatattttagattatgagttacatgaaatccagaaaatcagtagggacttttcttagaaattcaagtaaacttaacatttctagtcttatggttttaactatctgtgaagatctttttctctgtttgcaattactaattatcttctttcctgccttccataatccactgaagctgatttaggatcttcctttaactctgaccttccttcagacttccctgcatttctagctactagctgggtaccttgacctgaccagtgtgtccagagccaaccagtttctggtttatttctttttgctttttcccacatggagtcttgctctgtcgcccaggctggagtgtagtggtacaatctcagctcactgcaaccttcgcctcctagtttcaagcaattctcctgcctcagcctcccgagtagctgggattacaggtacagaccaccacgcttggttaatttttgtatttttagtagagccagggtttcgccatgttggccaggctggtcttgtactcctgaccttgttatccacccacctgggcctcccaaagtgctgggattacaggcatgagccaccacacccagcccatttctggtttatttctgtcttttttggtattctgtgtttttttgtatttgtcaccagctttgttcaggtctttcctcctgaaatatttacagtagcctcctaatttatcgtttccttctttctgtgccaaatgctatttttctgaattttttcctaaagtactgctttagacgtgttttttctctccttaaaatccatactccaaattgcatgaacctgtgaggcagaggttgcagtgagccaagaccttgccattacactctagcctgcgcagcaagagtgaaactctgtctcaagaaaaaaaataaaaataaaaaatccatactccgctgggcatgatggttcacgcctataattccagcactttgggaagctgaaataggaggatcactggaggccaggagtttgagcccagactaggcaacatagcaagaccttgtctctacaaaaaataaaaagttagctgggcatggtggcacaggcctttagtcctaggtattcaggaggctgaggcagaaggatcacttgagcccaggattttgaggctgcagtgagctatgattgtaccactgcactccatgctggatgacagagtaagaccctgtctctaaaaataaaaatccatactctggccaggcacggtggcttgcgcctgtaatcccagcactttgggaggctgaggtgggtggataatctgaggtcaggagtttgagaccagcctggccaacatggtgaaacctgtctctactaaacataaaaaaaaattagctcggggtggtggtgggtgcctgtaatcccagctacttgggaagctgaggcaggagaatcgcttgaacctgggaggcagaggttgcagtgagccaagatcgcaccatcgcaccattgcactccagcctgggcaacaagtgcaaaactctgtctaaaaaataataatataatccatactccatgaaggccttccacaaagtagacctatcttagattttcaaatttatctttcatcttccaaagataactgggcactttcctacttctttttctcacaatatgcttcctttttttttttgagacaaagtctcgtgctgttgccaaggctggagtgcaatggcgccatcttggctcactgtaacctctgcctcctggattcaagtgatactcgtgcctcaacctcccgaatagctgggattacaggtgccgccaccacgcccaactaatttttgtttttttttagtagagacagggtttcaccacgttggccagtctggtttcaaactcctgacgtcaggtaatctgcccgcctcggcctcccaaagtgctgcaattacaggtgtgagccactgcacccagccacgttatgcttcctttagccctttagcactccacatttatcttttttttttttccaattgactactacgtgtgttctatttctagggtactaatactcaaagctcatcttcttcttatagcactccttagcctcgtaggaaagacactcctttctcaggattctctagcgccctgattctgcacccaaaattgggagtaaatgctatgtaacccatctatttaccacttgttttatgctgtttgtctacttgtcacattttctgttaggtgtcaagctcctggagagacagggatactggctttttgaattatgggtagcattggctctcaaacctcctttctactttgattcacaacataaaacatttttttgttgttgggggggcagggcacaggtcttgctcttttgcccaggctggagtgcagtggtgcgatctaggctcactgcagcctctgcctcctggattcaagcgattctcctgccacatcctcccgagtagctgggattacaggggcccgccaccacgtctggctaatttttgcatttttagtagagatggggtttcaccatgtttctcagtctggtctcgaacgtctgacctcaggtgatccaccgcctcggcctcccaaagtgctgggattacaggcgtgagccactgcacctggccgcacataacccatttatatttgcaacaacactcaaccatggaaatatatagattataaaattagatatcaaaattctcagaatgttgcttataacttcatgtctttctccctcaaagtatatctgaatgcaagttattgagattaatgtaggaataatcttcagtctgctctgattcttttttttttgagagaaggtcttgcatggtgataggcacacaccaccatgcctggatttttgttttgttttgttttaattttttgtagaaggggaggtctcattatgttgctcagactggtctcgaactcctgagctcaacccatcctccctcctgagcctcccaaagtgctaggattacaggtgtgagccactgtgcctggccttctagttcattttttaaattattcaaagctgccttttttagcaacgaaacacttggatactccataacttgagactccagtgagtcctgacatcgagtttggaaactgttctacatataaaataatgaatgtttaacaggcaaaattaaatgtaggtctaaatttttagtagctcatgcctgtaatcccagcactttgggaggccgaggcgggtggatcagctgaggtaaggagttcgagaccagcctggccaacatgtgaaaacccatctctactaaaaatacaaagaaattagccggacatggtggcacacgctttaatcccagctactcgggaagccgaggcaggagaattgcttgaacctgggaggcggaggttgcagtgacccaagatcacgccattgcactccagcctgggtgacaagagcaagactcctgtctcaaaaaaaaaagcataatcagttgataccaatattgaaatattgcctatttcaggtcatgttgggcctcttgttaaaacttttggagtacagaatttctgaagtgctgagaaaaatataaggtaaccagcatcaacattttttccttttcagactcctgccctaagagccatagggaatatcgtcactggtacagatgaacagactcaggttgtgattgatgcaggagcactcgccgtctttcccagcctgctcaccaaccccaaaactaacattcagaaggaagctacgtggacaatgtcaaacatcacagccagccgccaggaccagatacagcaagttgtgaatcatggattagtcccattccttgtcagcgatctctctaaggtaacgaagtcttaggatttaatcaagtcatttttagtatttatagaaagctgtgcttgataagcttcttcatgtgcaagaatcttgggttctactaggagtcctttgctgaacaatacccagtaacccctttacttaaggttgtatcaatagaaccttggtactttcagtcaccgtttttgtgaaaaagtactcttggaatcttatttgtgcaactgttctgaaataaaaccatttccttatgtttaattggcagattttgagacacaaaaggaagctgtatgggccgtggaacagttgaacagattgtgtaccttgttcactgtggcataatagaaccgttgatgaacctcttacctgcaaaagataccaagattattctggttatcctggatgccatttcaaatatctttcaggtaagtcctatcaaggtggctttgtttgaatttggacttgataataattggtttactatttagacttgggggagggcagctgtaagtttactcactagtaagccacagaatcagaaagcctgtttatgtggccacccctttgattaaaaatgtggcaggcattataaaagatataaaagagatgacaagtggatggtgcgaactgaatcggagtcaggcgcttatgtggactcatcacacctgtttacttggttgatttaatttcccaatttcataccgaattttggtgacattaaatttgaatgacttggccgggcacagtggctcatgcctgtaatcctagcactttgggaggctgaggtgagtggaccacctgaggtcaggagttcgagaccagcctggccaacatggtgaaaccctatctctactaaaaatacaaaaattagccaggcctggtggcagacgcctataatcccagctacttgggaggctgaggcaggagaatcgcttgaactctgggtggggggcagaggttgcagtgagccaagattgcgtcacttcactccagcctgggcgaaagagtgaaactctgtctcaaaaaaaaattttttttgaatgacttaattatatttttcttctggttccacccctaactgatccaagcataccagcatatggcactttgccgtagtgattggtggtaggtaagcccttctcatcaactttggattctagaaatttttacatatagaagttgagcctacaggctgggcatgttggctcacgcctgtaatcccagcactttgaggaggccgaggcgggtggatcatgaggtcaggagttcaagaccagcctggccaacataatgagacccccgtctctactaaaaattaaaaaaattagctgggcgtggtggcaggcgcctgtaattccagctactcaggaggctgaggcaggagaattgcttgaacctgggaggcggaggttgcagtgagccaagatcacgccattgcactccagcctgggtgacaagagtgaaactgtctcaaaaaaaaaaaaaaaattgagcctacaataatggatgctggtgtatctgtcactgtgtataaataatttgtcagtatgtggccagtatttcttctttccttcatctaatcccctaagttattttgaagcaaatctgttatttcatctatagatatttatgtatctcttaaaagttgaaaatttaaagaaaaactaacctacataccattccatgtgccccgtaaatccttaataccaacacacattctgttcggagacatttagtttagcactccataggccatctttgcccttagacaccttgactacaccttgtgatgatataggatgctttacgaaacaatacgcccctgttcccatagcagaccagttgaactggagtgtagtgttgttttaaaagttgcccacgttggccaggcgcggtggctcatgcctgtaatcccagcactttgggaggctgaggcaggcggatcacgaggtcaggagatcgagaccatcctggctaacacggtgaaaccccgtctctactaaaaatacaaaaaattagccgggcgtggtggcacgtgcctatagatccagctacttgggaggctgaggcaggagaatggcatgaacccgggaggcggagcttgcagtgagccgacttcacgccattgcactccagcctgggcaacagagcgagactccatctcaaaaaaaaaagaaaacagaaaaaaagaaaaaaaagtggcccatgtgattttgatacatacaaaaggttgagagctactgattgtaagatctctggctccagtcgaagtactgctaagagtaggtacagatccaatcacactgagtttcaacaaaatatagaatggacataaaactatgataggcttgatgaaggaactgttaaggtgcttatttctgcctgacatatcaatattcaaattttcgatgttttcttcattaaaacattcagagtatacgccagtaaacttggattttttttttttttttaggctgctgagaaactaggtgaaactgagaaacttagtataatgattgaagaatgtggaggcgtagacaaaattgaagctctacaaaaccatgaaaatgagtctgtatataaggcttcattaagcttaactgagaagtatttctctgtagaggtgagtaatggatggtaatattaataacaacttggaaaaatgtaaagccaaggccatgagcccttttttccctcatacttttaaaaatgagcctcatatctttgttaaatatagtaaaatatcagtgtgcataggacgtaatgtacttattgcccctctgatgtttggcttgatggtaataaaatctatttatttatttatttagctttggtttctacaaattattttattagaatgtcagactcaaaaggaactaccagtaacatgcctgaacatgctatatatgatttatgcttgacccgtgacacctgctgtcactggatccagagtgtgaacaagggaaaaggaagtggatgtgggcagggacagcaccagccctggctggccagacctcaggcccacagacgtggtccccataaccaccaggatccctacaatatacacattcctaattcaggctcaactctcctttacccaagagtaaatgcctcaggactcaatctgaatcactgtccgtctcggcttctttcacatccatgctgaatttgtactcctggtcacatcccatgtaagcatcactcatgaagtatagagtgtagttgtgggcaccagtggctggagccacaaagtccaacttcaccttggccttctgctgcaggatcagcctcttgatggagatgaggctattggacttggtgtctccaatcaccacccaccagccctcttcacgtttctgcgggaagagaggcgcaatgacagggcctgtgacttcctcctctcgctccagctgcaccagcaccaccgctggcccgccactgcggatgctgtccttatccaccacctcctaagatagttcgatattagggtagcagttacaaaagcgagccacatctgtaatctggctgtcagtcagctgaagaattgtgttccgttcttcatcctccatctccatgatgtcgaaaacactcttcactcccttgtctgtgcaacgtttgatatgctcagagatgaagtgtggcagctgcttcaggtatgagtccttggaccacatggcttgggtgaccatctgggccaattccatagctgccagagcagagctgagccacccattgctggagaggacatccacgcaggcctggacgagccggactgccttactaaggatttcctccgtatctgactgcaactcagcactcagctgcatgcgggacaggtgagcctgcaggagcaggttggtcttgatgtgcggatcattgaacttagggttattcagcttgtcagggaccttctgagccaactgcctcaggaagttttcttcatggtgctggatggggatattctcgtaccctgctgcattggagatgatctcaataagccctcgcaccttggtcttggcgttgaggtgagattttaaaagtcaccagattagtttcaaatgaacagccttgagaatcttagaatatcttgagggtaagttaacgggtgtcattgtaggaggtgatagagaagtaggccaaacccaccaccatgctctgggcctaatacagtcttttcctattgaaaagtgacggttggggaagaaaaaaaatctcggcctgtttctgttactgtagtagctagcacttatgaattggcaaagtttcagagaccctccctcccctatgtcagatactacaataccatacaggattaaaggtgtaatatgcagatcaagacctagagattaaatacagacttcaggtaggctgctgcttggaatacttattatttttatacttattttttaatatatttccaggaagaggaagatcaaaacgttgtgccagaaactacctctgaaggctacactttccaagttcaggatggggctcctgggacctttaacttttagatcatgtagctgaggcataaatttgttgtgtactatgtttggtattttgtcttattgtttctctactaagaactctttcttaaatgtggtttgttattgtagcactttttacactgaaactatacttgaacagttccaactgtacatactgtatgaagcttgtcctctgactaggtttctaatttctatgtggaatttcctatcttgcagcatcctgtaaataaacattcaagtccacccttttcttgacttcacca

SEQ ID NO: 1048 - DNA, 2716 bp, Homo sapiens
ttgtgagttattaataattttaaatatattaacatatgttaatgtaattaaatacaatgctggaatccatttgctaatattttatttaaagttttttgtctttgctttggaatgtgattggcctttcagttttgtctgtttattagaatcaaggtatatctgcctcatgaaaggtatgtgtttgtttgtttttcctttctattctctgaaagagttttggattatctattcctttagtgtatggtagaacactcctaaaaaacttttgggctggtgttttttaatgggtagattttaattactgattcagtttctttggttgttcaatagtttattcagattttctgtttcttttttgagttagttttggttctacatttgttttgaagaaattgcctgttttacttattttctaattaatttgtaatatagttgttcaaagcattattttatgattgttaaatatcaaccgtatttgtaactatgtcttcttttgttcacagcacctttttttttttttttgtctgagtcccactctgtcgcccatgctggagtgcagtggcgcgatctcggctcactgcaaactccacctcctgggttcaggtgattctctcacctcagcctcctgagtagctgttcacagaaccttttattcttactctttcattaaaaatcttgctaaaagtttgtcaattttcaatgaaacaaatttaggattgtgatacttgctattgtttcattgtctttagttcattgattttcagtcatatctttatcattttcttccctctattcaacttgcctatcgtggatacgtttttttttttttttttcccttctaatttcttgggttgtatgtttggctcattaattttcaactcctttatgtcaaaggcaggattttaagacaataaattttcctttaactgtaactatagctgcacctcacacatttttacaaatagtttcagttacaactcagtactagatattttttaatgtctgttatcatttatttcctgtttaattaatgatttacctaaaagcattttcaaaaacttattgccataaatgtattcagtctttttccttttctaatagcttgaaactagaagttgaataagatcttgcccagaaaaaaagcatgtttttaaatccccaaatttatagagttctttttgctttttaaaagattattgatttataacttaatagcattatggttgatgacttggtttatatgatatcagttctttgctatatgttgagatgtgttttgtggcctaaaatgtggtcaatttctgcaaacgtacaatgtgcacttaaacagaacatacattctttttttattaggtacggaaatccatatatgtcaatttatataagtggttccaatccttttaatgacatctcatatatagaaaattctaatatttgtacagcacagtagcataagttggagttgatttgaaaatgtcttgcagggcttactaaaatatttattgtaccttttaaaattttatataattacaaggaaaaatacaaagtattagataagacattgttaaatttttataagcctaaataaaacactttcagaattttacttgagaaacttgagtttgctttcatgaacataactattttaatcagattttatgtttgaaatagctatagatcattcctgattaagatgttttaataatgaccttttctaatctcctcaaattcatggtgttgaaaacccaatgaaaatatttgtccaaataaattaccaaaatcatgttacaacattttaaaaacaattcaaaccgttgatattatataggaagcatctaaagttcttccttaatttcactgaaaaaatgtaatttgaaatttcttgtgacagggcatggtagctttgtaacgtgtccacttggctagttgaactgtgtctcccagaagccctttccctatgtgttttcagtcaggatgggcttcaggaggcatttttgcatgagatttggagggcagaagtgaagcagaagccattctgctttgtatgctgggaaggttggagcaagggcgttttaaggctcacacgtgttgctttatctgtcggctcacctcatttgcttagggtagcatctgggctggaactgctgcaccttcccttaaatctaactttggcttctccagttcctgagccaggtgtgtgtttatgtgtttagctctgggaaaaagggcattagtgtctcctgcaggacactcacttcatcaaggctggagacagcaagaactgacactggttccaggccatccttgtaggttacatcttgaccttaatctctcctatttatatgcaccttgcctgctcttgggtttcaaatccagcattagacgcaaaaataatagcgtaatagaaactgttcaaccacagcaaagcacggtggctcacgcctgtaatctcagcactttgggaggccgaggtgggtgtctcttgaccgaggtggtcaagagttcgagaccagcctggctaacatggcgaaaccctgtctctttactaaaaatacaaaaaattagccaggcgtggtagtgggtgccaatcgtcttaactactcaggaggctgaggcaggataatcacttgaacctgggaggcagaggttgcaatgagcagagattgcaccattgcactctatttagcctgggcaacaagagcaaaactctgtctcg

SEQ ID NO: 1049 - DNA, 2716 bp, Homo sapiens
ttgtgagttattaataattttaaatatattaacatatgttaatgtaattaaatacaatgctggaatccatttgctaatattttatttaaagttttttgtctttgctttggaatgtgattggcctttcagttttgtctgtttattagaatcaaggtatatctgcctcatgaaaggtatgtgtttgtttgtttttcctttctattctctgaaagagttttggattatctattcctttagtgtatggtagaacactcctaaaaaacttttgggctggtgttttttaatgggtagattttaattactgattcagtttctttggttgttcaatagtttattcagattttctgtttcttttttgagttagttttggttctacatttgttttgaagaaattgcctgttttacttattttctaattaatttgtaatatagttgttcaaagcattattttatgattgttaaatatcaaccgtatttgtaactatgtcttcttttgttcacagcacctttttttttttttttgtctgagtcccactctgtcgcccatgctggagtgcagtggcgcgatctcggctcactgcaaactccacctcctgggttcaggtgattctctcacctcagcctcctgagtagctgttcacagaaccttttattcttactctttcattaaaaatcttgctaaaagtttgtcaattttcaatgaaacaaatttaggattgtgatacttgctattgtttcattgtctttagttcattgattttcagtcatatctttatcattttcttccctctattcaacttgcctatcgtggatacgtttttttttttttttttcccttctaatttcttgggttgtatgtttggctcattaattttcaactcctttatgtcaaaggcaggattttaagacaataaattttcctttaactgtaactatagctgcacctcacacatttttacaaatagtttcagttacaactcagtactagatattttttaatgtctgttatcatttatttcctgtttaattaatgatttacctaaaagcattttcaaaaacttattgccataaatgtattcagtctttttccttttctaatagcttgaaactagaagttgaataagatcttgcccagaaaaaaagcatgtttttaaatccccaaatttatagagttctttttgctttttaaaagattattgatttataacttaatagcattatggttgatgacttggtttatatgatatcagttctttgctatatgttgagatgtgttttgtggcctaaaatgtggtcaatttctgcaaacgtacaatgtgcacttaaacagaacatacattctttttttattaggtacggaaatccatatatgtcaatttatataagtggttccaatccttttaatgacatctcatatatagaaaattctaatatttgtacagcacagtagcataagttggagttgatttgaaaatgtcttgcagggcttactaaaatatttattgtaccttttaaaattttatataattacaaggaaaaatacaaagtattagataagacattgttaaatttttataagcctaaataaaacactttcagaattttacttgagaaacttgagtttgctttcatgaacataactattttaatcagattttatgtttgaaatagctatagatcattcctgattaagatgttttaataatgaccttttctaatctcctcaaattcatggtgttgaaaacccaatgaaaatatttgtccaaataaattaccaaaatcatgttacaacattttaaaaacaattcaaaccgttgatattatataggaagcatctaaagttcttccttaatttcactgaaaaaatgtaatttgaaatttcttgtgacagggcatggtagctttgtaacgtgtccacttggctagttgaactgtgtctcccagaagccctttccctatgtgttttcagtcaggatgggcttcaggaggcatttttgcatgagatttggagggcagaagtgaagcagaagccattctgctttgtatgctgggaaggttggagcaagggcgttttaaggctcacacgtgttgctttatctgtcggctcacctcatttgcttagggtagcatctgggctggaactgctgcaccttcccttaaatctaactttggcttctccagttcctgagccaggtgtgtgtttatgtgtttagctctgggaaaaagggcattagtgtcttctgcaggacactcacttcatcaaggctggagacagcaagaactgacactggttccaggccatccttgtaggttacatcttgaccttaatctctcctatttatatgcaccttgcctgctcttgggtttcaaatccagcattagacgcaaaaataatagcgtaatagaaactgttcaaccacagcaaagcacggtggctcacgcctgtaatctcagcactttgggaggccgaggtgggtgtctcttgaccgaggtggtcaagagttcgagaccagcctggctaacatggcgaaaccctgtctctttactaaaaatacaaaaaattagccaggcgtggtagtgggtgccaatcgtcttaactactcaggaggctgaggcaggataatcacttgaacctgggaggcagaggttgcaatgagcagagattgcaccattgcactctatttagcctgggcaacaagagcaaaactctgtctcg

SEQ ID NO: 1050 - DNA, 545 bp, Homo sapiens
gcttgcaggccattcaagttcatattagtcacaaacagaaaaaagcatcaatggtggattaaagaaaactgcaaattctttgatatttttcccatttagaggcggggtctactttcccttttcttgaatctaggctgacctgtgactgcttcggccaactgaatagggaagagtgatgctgtgctgtttccaggcctgttctttaaaagtacttggaagcttctgccttggcctctttgtgcctgagttgctgtataagaatctgactaccttgctggagagaccttgtggagaagacttgaccttatatgcagaggtagaggggccctggttagtccagccatctagccatcctgtcaaaatagcaggtatgtgagaaaagctgtcttgattcctccagcccagcccagccaccaactgaataataccaagtatatgtacctcaaatggaggaaaagaactgctcagctaagtcctgcccaacgtcctgactcagaagataatgacagataatgaaatgattgttgttttaagccactgtgttt

SEQ ID NO: 1051 - DNA, 315 bp, Homo sapiens
attcattacagtttttgaacttcaggattcaagtgttttaatcattgatgaaaacatttcaaccattatctcttcaagtattgcctgtcttattttcctctatttcgcattcttggaattaaatctgttggttctccttttccgtcttccatgtcccttaatcttccatattttccagatctttatatctctgtgcctattgagtaatgtctaaaatctgttttccagtttataaattatcttgctatatcaaatctgctatttaacctactcatttaagttttcaatttccttgacatatacctatgtgaatgg

SEQ ID NO: 1052 - DNA, 503 bp, Homo sapiens
ctcttgcaaggaatcactgtgtgtgtgtgtgtgtgtgtatgtgtgtgtgtgcacgtgcatgcatgtgtgtgtgtgtgtggtatatacatgtacatacagatatatacacacgtagatacatgcatatttagaagtaagggaataaacaaacattgaattcaagaatattgtcataaaagggcattgcctcctccctcacaaaacaaggtgcactaagcttctcaagccctcacttcagtgggctgatggaaatatagccaaagtattttaccatgttttgtaagatctcttggtttagcaaatacattcaaagaaatttttccaccaaacgtgccacaagaattgtgttttcatttctcctgtgcaagtacagaatggagagaaagtaggcaatcagggagagatgcaaagagtctagcaaattatttctagcataatcacacatttaacttcagactcagccttgttttataattccaaaaaaaaaaaaaatgaaggtcaaa

SEQ ID NO: 1053 - DNA, 2870 bp, Homo sapiens
gaaaatccataattaaaacattaaaaatgggccaggcggtagctcacgcctgtaatccaagcactttgggaggctgaggtgggaggattgtgtgaagccaggagttcaaaatcagcctgggcaacatagcaagaccccatctctacaaaaaaatttgaaaaatagccaggcgtggtggcatgtgcctttagtcccagcttactctagaggctgaggcaggaagattgcgtgagctcaggagttcaaggctgcagtgagctatcatcacaccactcagagcaagactgtctccaaaacagacaagtgaacaagaaaacattagtgacggatctaaggaaacttagccaagttttgataacagaacctgggcgttgtggcatactctataaaaagccattcagcagccttcatctaccttttattctgcttcacttttatttaacttctgtagccctttaaaaaaaatcaatcttcttgtttttatttagtataacagaagagaactataatttcctgccacatagcccctccaagaaagattctgaatggaagagtggaacaaaagtcagtcgtacattcagctacatcaagaataaaatgtctagcagcaagaagagcaaagtgagtatcactgtgggcattgcttgtgatcacctcagtaggatcctgtcacagcctgcattcacaccaaaactggttaaatcatggggacataaatggaaataaattcaggattactctccgaaatcgcctaatatttaaaggaaaataataagaagaaaaatagcaagaagtggaactaccagttactgagttttcactatatgctaagtgctttccatatattatttaaccctttcaacaaccctgtcaggtaggtgttatctctcttttctaaaagtgatgtaccttaccgaggatactcctctaatgtgaagaagtagttcaaaccagatctctttggtttcaaatcccatactcttaaaccacagtgcttaaatctgtaatatcagtttaaatgcaacagaaggattttatgcaaagatcaaaggattgaaaatatttatatttgggtttagagggaaggattatcccacagaagattacaagaacttttaagactaatatgatttcttagatctatttctaattaggagcatttggaatatattctcttagtgattaagagattaaataaatgtttaaaccgtgtgtgtgtgtgtgtgtgtgtgtgtgtctgtgtgtgtgtgtgtgtgtaaggctccactgtatcacccaggctggagcacagtggcgtgaccatagctcactgcagtcttgaactgccaggcttaagcagtttcctggctcgcaccgtagcctcccgagtagccaggactacagtcatgttgtgccatcgtgctgagctatgtttaaatttgtttgtaaagatgaagtcttgctgttgtgtctaggccggtctaatgccttacctcaaacactcttctcgctgcaggcttccgaagccctgggtgtgatccaccgtgcccagcctaaagtaacattttttatctaattatttttcacatgctcattatggaaatcttcaaaatctaaaagtaaaagaatgaaaatctcctggaataaccccgcttagagataactacacttaatgttttggtttatatatttctaatcttttttaaaaatgtattttcaaaagaaagggagaaaagaagttcactttcttatactgattcccagtgctaaaccaaaactgattccatttcaagtccgtggggaaaaacttttcgcctctcacaccctgttcatctacccacaacaccctctaacaaaataaagacataagtaaataaaaatttgaaatcagttaaggaactcttgcaaggaatcactgtgtgtgtgtgtgtgtgtgtatgtgtgtgtgtgcacgtgcatgcatgcgtgtgtgtgtgtgtgtgtggtatatacatgtacatacagatatatacacacgtagatacatgcatatttagaagtaagggaataaacaaacattgagttcaagaatattgtcataaaagggcattgcctcctccctcacaaaacaaggtgcactaagcttctcaagccctcacttcagtgggctgatggaaatatagccaaagtattttaccatgttttgtaagatctcttggtttagcaaatacattcaaagaaatttttccaccaaacgtgccacaagaattgtgttttcatttctcctgtgcaagtacagaatggagagaaagtaggcaatcagggagagatgcaaagagtctagcaaattatttctagcataatcacacatttaacttcagactcagccttgttttataattccaaaaaaaaaaaaaatgaaggtcaaagaatactgctttaccagtattctacgtatttacatattggcagccaggcttaaaatagagccttacctattttacttaccactgccggcttggatactagttggtatcaacaaaagaaaatccccttggacagagcaatgtaaattagccaagtattattaaatgccttgtatagtcttagcattccactaggtgttaacaggcacctaagagaactaaagctcatagtcctgaccttgaaaaactttatgatctagtttggatgaattcaaaatgttttcattgttttttattttgctttaaaactactgaatcttgtcttcaaacaagcttttcgtggaagaccaataaataagtggagattccccctttctagccatctccccaatgtcatggagttttaggacagagcagtgaatgtaccactcatctcatggataaggtaaaacatacacatgataggaaaaaaaacaacgtaagatg

SEQ ID NO: 1054 - DNA, 1294 bp, Homo sapiens
tcattatggaaatcttcaaaatctaaaagtaaaagaatgaaaatctcctggaataaccccgcttagagataactacacttaatgttttggtttatatatttctaatcttttttaaaaatgtattttcaaaagaaagggagaaaagaagttcactttcttatactgattcccagtgctaaaccaaaactgattccatttcaagtccgtggggaaaaacttttcgcctctcacaccctgttcatctacccacaacaccctctaacaaaataaagacataagtaaataaaaatttgaaatcagttaaggaactcttgcaaggaatcactgtgtgtgtgtgtgtgtgtgtatgtgtgtgtgtgcacgtgcatgcatgtgtgtgtgtgtgtggtatatacatgtacatacagatatatacacacgtagatacatgcatatttagaagtaagggaataaacaaacattgaattcaagaatattgtcataaaagggcattgcctcctccctcacaaaacaaggtgcactaagcttctcaagccctcacttcagtgggctgatggaaatatagccaaagtattttaccatgttttgtaagatctcttggtttagcaaatacattcaaagaaatttttccaccaaacgtgccacaagaattgtgttttcatttctcctgtgcaagtacagaatggagagaaagtaggcaatcagggagagatgcaaagagtctagcaaattatttctagcataatcacacatttaacttcagactcagccttgttttataattccaaaaaaaaaaaaaatgaaggtcaaagaatactgctttaccagtattctacgtatttacatattggcagccaggcttaaaatagagccttaccttttttacttaccactgccggcttggatactagttggtatcaacaaaagaaaatccccttggacagagcaatataaattagccaagtattattaaatgctttgtatagtcttagcattccactaggtgttaacaggcacctaagagaactaaagctcatagtcctgaccttgaaaaactttatgatctagtttggatgaattcaaaatgttttcattgttttttattttgctttaaaactactgaatcttgtcttcaaacaagcttttcgtggaagaccaataaataagtggagattccccctttctagccatctccccaatgtcatggagttttaggacagagcagtgaatgtaccactcatctcatggataaggtaaaacatacacatgataggaaaaaaaacaacgtaagatg

SEQ ID NO: 1055 - DNA, 129 bp, Homo sapiens
tttttcttttgagacagagtttcgctcttgttgcccaggctggagtgcaatggcgcgatcttggctcactgcaacctctgcctcccaggttcaagccattctcctgcctcagcctcctgagtggctggg

SEQ ID NO: 1056 - DNA, 438 bp, Homo sapiens
cagccctcagcctagcctccttattttacaaactgaggcacagagatgtatgcttcatgtcacacaacctcacacaacctcacacaacctcctgttatctgacttccaggaagtagtactcatcattttgtgtttaaacaaaatgttactatacagcgtaatttttttcttttaacttttttaatctgaaaggactggagtttgctaggaggagatgagcagaaaggacaggagaaaacatattttgtgttagaccgaaatctgtgatcactggtagaaacttttagtatcagttgacctcttgtctctgatcatctcctttgtcaaaatgacaacacttttttgcaattgagattggttcctctttcagacttggcttcaagatttgatctcttggggtcgtgctgtctttagcagtggaaactcaaaaaattacaa

SEQ ID NO: 1057 - DNA, 438 bp, Homo sapiens; identical to SEQ ID NO: 1056

SEQ ID NO: 1058 - DNA, 531 bp, Homo sapiens
ggacatgcgtgtatttgtagttcagctaccatctagacttaatcataagtacttacttggttaagggaccaagtgattttctattaaaaagcaattcgtatttttatttctttagttgtagttgctaagtagagctgttgctgatgatgagatgtttcatgctgagataatgaaaaatttactgtattggatcatctcagcagtcctattgagggttatttcacttatttccatgatgtttcaattaagctttttgtagtaaatattgataagagctattattgtacttgcagatctggaattaataagagaccatgttgggggaaaactacttgttacatttaatcacaggctcatctgaaagtctttggtgttgtatgtgaagttgtatgttcaattatatagtatacataaaaattataatgtatacataaaaagccactgagatgttttgaaatttattaagtttacgtataataactctcattaaaattattttctataatctttcttgtgaggtctagttgttaa

SEQ ID NO: 1059 - DNA, 357 bp, Homo sapiens
ttgtaatgttgtgccattgtatcaccaatatattgctttaatcaggaagagaggatcctgtattccagattccatcttgttctcagtttctcaacctttaaatgtatttgttatcttggtcatctctgaatctgatggctaaaatctaatctaacttaagatagttttttttagtatttgaattccgggtctagtgtgctttccttcacttgtgttcttcaggccgacagtggaagttccccagtctttgggtttgcttagtttgttctttataatgtgggttatttttctctaagcatgttgtagttttgtaatgtccttcttaagttaattatcaccttttcagcccaagatttt

SEQ ID NO: 1060 - DNA, 615 bp, Homo sapiens
  misc_feature (587): n equals a,t,g, or c
caacaagaatttttacccatcagcactacagaggctgaaaaacttctcttcaacagttcagtgcgccctgtgcaggagtcagcccggcatctgcttgtacacacagctccttgcataggtgtggagttagatctggacagtgaacttcaggaagtcctttcttataggaggctaatagggattgagaataacatgagaagaaaacgctaataaagggaaacctgaacacgctgctgtcagcatgtgttttcaaagtgcagcctgcctcagagttcttcggagcctgaaaaggggtttgagaaagagcccagtaggaggggcaggaggccgacacacctgacttggcctggggcccaggaggcaggtgtaagggagtgaaaagaaaggctagccggaggctgcggggggaagaccgcagactccctgctgcttcgcatccctcctgtggcctccactgcaggcaggacaaacctggatgccacctggagctgcttcctgagttggcacactatcgtgtcacagcagtcttcagccccctggaaggaggccatagtcgtgtgaggatggcaaagtcgaacaggaagctntgagtgccttcctccacgatgtcaacga

SEQ ID NO: 1061 - DNA, 1763 bp, Homo sapiens
caaagtggccttctgcaccagcatccctcaggacaccctgctggggaaggcccggcccggcacaacagcagactgaggcccccaccctgaaaaagcctaggacattcctgggcactgtcatttagggtgctgtacaaatcacctccgcctagaaaatggaattcaacagtcaggatacagatttccaaggccaactgttggccccaacatgcaacagtgagaccataagcctcccgtgggccacattttgacagtggatgcccttcagggtgatatatgctataaagcagttttctatcacctaagtggtttttcttgccaacaagaatttttacccatcagcactactgtggctgaaaaacttctcttcaacagttcagtgcgccctgtgcaggagtcagcccggcatctgcttgtacacacagctccttgcataggtgtggagttagatctggacagtgaacttcaggaagtcctttcttataggaggctaatagggattgagaataacatgagaagaaaacgctaataaagggaaacctgaacacgctgctgtcagcatgtgttttcaaagtgcagcctgcctcagagttcttcggagcctgaaaaggggtttgagaaagagcccagtaggaggggcaggaggccgacacacctgacttggcctggggcccaggaggcaggtgtaagggagtgaaaagaaaggctagccggaggctgcggggggaagaccgcagactccctgctgcttcgcatccctcctgtggcctccactgcaggcaggacaaacctggatgccacctggagctgcttcctgagttggcacactatcgtgtacacagcagtcttcagccccctggaaggaggccatagtcgtgtgaggatggcaaagtcgaacaggaagctttgagtgccttcctccacgatgtcaacgaggagatccagtgccagatcgaggtggatggaacacccaggggtaggggtgcaggtgtgggcagtgatgtcccttcccctccctcccctggtcccacagactgtggccatgaggctgcaggctggtgctatgacagcagattgcagcacagggccctcccctccagcccccagtgggacatcaaaaccaccctggggccatttgtgcagggcaccacctccagtattgatggggaaaataaactcagtagagccacgacagggtggagagaagcagggaccattgtcttcctcaggagcgtgacagctgaccccacagaccatgcttgctggtacacactggtcccagacccaggcctgtcggacatcagcagtgtgctaaaaacgtgtaagatgtcactactcaccgtgtgtcctatctagttgacatgggtggagtcagctaaggggtgaatgttcatatgctcccaattcacgttgaagccctaatccccaaagggatggtattgggggtggggtcttggagaggtgattaggttatgagggtggagccctgatgaatgggattagtgctttataaggagagacaccagagagatgatctctctctccaccatgtgaggacacagtgagaagacagccgtctgcaggcccggaagagagccctcaccaggaaatgaaactgttggcaccttgagacttcccagcttccagaactgtaagaaataaatgtttgttgtttaagcctttcaggctacggctttctgttacagcagcctgaactgagagtccatgccgagtttttgaaataaatgtgaattctgatgtta

SEQ ID NO: 1062 - DNA, 1766 bp, Homo sapiens
caaagtggccttctgcaccagcatccctcaggacaccctgctggggaaggcccggcccggcacaacagcagactgaggcccccaccctgaaaaagcctaggacattcctgggcactgtcatttagggtgctgtacaaatcacctctgcctagaaaatggaattcaacagtcaggatacagatttccaaggccaactgttggccccaacatgcaacagtgagaccataagcctcccgtgggccacattttgacagtggatgcccttcagggtgatatatgctataaagcagttttctatcacctaagtggtttttcttgccaacaagaatttttacccatcagcactactgtggctgaaaaacttctcttcaacagttcagtgcgccctgtgcaggagtcagcccggcatctgcttgtacacacagctccttgcataggtgtggagttagatctggacagtgaacttcaggaagtcctttcttataggaggctaatagggattgagaataacatgagaagaaaacgctaataaagggaaacctgaacacgctgctgtcagcatgtgttttcaaagtgcagcctgcctcagagttcttcggagcctgaaaaggggtttgagaaagagcccagtaggaggggcaggaggccgacacacctgacttggcctggggcccaggaggcaggtgtaagggagtgaaaagaaaggctagccggaggctgcggggggaagaccgcagactccctgctgcttcgcatccctcctgtggcctccactgcaggcaggacaaacctggatgccacctggagctgcttcctgagttggcacactatcgtgtacacagcagtcttcagccccctggaaggaggccatagtcgtgtgaggatggcaaagtcgaacaggaagctttgagtgccttcctccacgatgtcaacgaggagatccagtgccagatcgaggtggatggaacacccagtggtaggggtgcaggtgtgggcagtgatgtcccttcccctccctcccctggtcccacagactgtggccatgaggctgcaggctggtgctatgacagcagattgcagcacagggccctcccctccagcccccagtgggacatcaaaaccaccctggggccatttgtgcagggcaccacctccagtattgatggggaaaataaactcagtagagccacgacagggtggagagaagcagggaccattgtcttcctcaggagcgtgacagctgaccccacagaccatgcttgctggtacacactggtcccagacccaggcctgtcggacatcagcagtgtgctaaaaacgtgtaagatgtggtcactactcaccgtgtgtcctatctagttgacatgggtggagtcagctaaggggtgaatgttcatatgctcccaattcacgttgaagccctaatccccaaagggatggtattgggggtggggtcttggagaggtgattaggttatgagggtggagccctgatgaatgggattagtgctttataaggagagacaccagagagatgatctctctctccaccatgtgaggacacagtgagaagacagccgtctgcaggcccggaagagagccctcaccaggaaatgaaactgttggcaccttgagacttcccagcttccagaactgtaagaaataaatgtttgttgtttaagcctttcaggctacggctttctgttacagcagcctgaactgagagtccatgccgagtttttgaaataaatgtgaattctgatgtta

SEQ ID NO: 1063 - DNA, 146 bp, Homo sapiens
tgggttttttcctcagatttttatttttgcacattcttgtgacatttcccattgtagggaacaggagtttagcaaaatcagcttcttagatgatgtcattctaaatatacatcttaaacaaacaatatcaaaaccaccagtaggaa

SEQ ID NO: 1064 - DNA, 307 bp, Homo sapiens
tctcattccctttccattcagaatctcaagagaaagctggttctagaaggttctgtgtaaccttctctggaatgttttgctgacttcccataacttgcataaaggacaagttcctttgaaacccgagttgtaaaagatcttccttgcccaggtatttaaaaataattcatcctttaagtcagaaatatatgctggatgttgtcttcctgcagaccagcccctgcaggctaaggcacctgctgcagggggagggccccgggaatccctgtggcctcctgcagccctgcttccggcttccctctgccct

SEQ ID NO: 1065 - DNA, 1177 bp, Homo sapiens
gtctcctgctgcttagggactctactagccttttacttaaagccagttctgatatgtttgtttttgtaatccaaatatgttcccaaaagattgatctatcaggggacagtttgagtataatgcacattttgtgtttgcttagcaggattttgttcacaagaaacactagtaaacaaagaaaactgtacctgcatgagccggagcatgtagaaatgcacacaatgtacacaggcaatgccgtgagcatctcccagtcactcccatccacagcctgtgtagtgagcccgtcacatctggtgtgacgactttccatcgaatttcgtacaaccttctttcctccacttcacaatggctcacaagctgcaaacttcagttcattttcaagatcaagggccatctttattagtattccatctcttaatatgtgtgaaattatgttactatttttatgaggtttctacattttaggtaaaaagtgtccgtgataaagtttgtgagtgttgtgccccaaccccatttttcttcctataaaccctgctgttcctacgacataatcacacatagttacaatgatattttagaaactcttatgtcacatcatagcaaaattgattatgcataatctcatttagtttagcttaattgagacaggtgggtattatgtcagtatttattatgtgggtgttattttttccaatttgcagctgtaggaattgaaggtcaggttgatccaggtcaccatctactatgtgtagtgctgaaattaaaacccaggtcagtctgcttcctaagtgtggctattagccatggtgctttgaggatggaagaaatctacttccttaatactcaggagattcacagagtcaggaccaaatactcacagagcatttgaagatttccagccaacattttcagagcctggctactatccaggggaatttaaagtgtgacgcagcccaccaaagttgattgcatcttagagaatggaatccaagtctcccaccaggaaaaatacaggcattcattagttccttcccctaaaaggttggacattgatccaggcactatagagcacctgggatacaacactgagcaaagcggtcttcctccctgcctcactctgcttagaggagccaattcctgggaatggagggggttgcagacattaaggaaagga

SEQ ID NO: 1066 - DNA, 1177 bp, Homo sapiens; identical to SEQ ID NO: 1065

SEQ ID NO: 1067 - DNA, 534 bp, Homo sapiens
aggaaggtgtactggcattggccccacattacagataaggaaaccagggctcagactggtgacctcattcctcaatgtcacaaaggtagtaagaggccaggaagggttagcagttcatctggcaaatgagtggctggctaagtaagccagaggcccaaagtggccactgccctgaagccctccccttacctggagcctgaagccagaagccagtgggcctctggggccagggctgaatgggggaggctggtccctgggactttggattgggaagcatcctgcagttacttgtagggccagggctcgttgctctgaaaagccctctgttttatatctcttgacacaagtaagatatagcaggatagctagaaacaaacaaatagagaaagaaggaactagaagacatccttgtgctctggtatccacatgtgtatctttttatataatctagaaatgtatgtatttcaaaggtttttcattctggaaaagtctgaaaccgacgacccttcttttgtaaaataaaggcctttgcgt

SEQ ID NO: 1068 - DNA, 534 bp, Homo sapiens; identical to SEQ ID NO: 1067

SEQ ID NO: 1069 - DNA, 648 bp, Homo sapiens
aagaggttagggcccgagagtcttatgagatgtgactgcttgctaaagaagaactgggcaaaattggtatgaattttatgggcatcagtttgggaatgaatatatcaagaaccttaaaaatatgcagttccaccttctaaacatgtatcctatgcaactagtcaaaaatgtagagtatcctgttcccatagagtatcctgttcccatttactgcagagtcatagtaaaacatagctaacagcctagatgtccaactctaggggattggctcaatacattctggaacatgcggcccattcaagcaactgtgtgaccattagaaactgttgcttaaaatatttgacagcatgtggaaatgcttatgatagtaagtggtgagtggaaaaagacgaaaattgaaaccatgtatagattatgacccaaatttcactttttaaatgtttatatgccaaaagagagtgagaatggattgaccagaaaggctatatatcccaaagggctagatctctgtagggtaggattatgagtactctatttttttttctttttttcaaaattttctaccaggatgtctcttacttttaggattcagaaataaagttatttggaacttgggagaggacctggaacagacagcacaggacggca

SEQ ID NO: 1070 - DNA, 648 bp, Homo sapiens; identical to SEQ ID NO: 1069

SEQ ID NO: 1071 - DNA, 4397 bp, Homo sapiens
ttttttgtatttttagtggagatggcatttcaccatgttggccaggctgttctcaaactcctgacctcgtgattcgcctgccttggccttccaaagtgctgggattacagacgtgagccaccgcgcccagccaaaagcccaattcttaaccagttgtctgtgcagcctcgcctgacccacctcagggtccctgggcaggagggagcctggtgtcagggtggccaccagatatgggtctcaatgctcacgtggagccatggccaccaggtacacagggacttccgcctctggctcaccagcctgcccagcaacaagttcccagtgtccatcctgcagaacggctccaagatgaccattgagccgccacgcggtgtcagggccaacctgctgaagtcctatagtagccttggtgaagacttcctcaactcctgccacaaggtgaggcacacttggtgcaggcctaccctacctgcccccgtccccgctcctcacctcccctgcctcccacctcccccaggtgatggagttcaagtctctgctgctgtctctgtgcttgttccatgggaacgccctggagcgccgtaagtttgggcccctgggcttcaacatcccctatgagttcacggatggagatctgcgcatctgcatcagccagctcaagatgttcctggacgaatatgatgacatcccctacaaggtgggcctggggcagactggggcctgggggactgggcacttaggggagccctcacccacccaccccataggtcctcaagtacacggcaggggagatcaattacgggggccgtgtcactgatgactgggaccggcgctgcatcatgaacatcttggaggacttctacaaccctgacgtgctctcccctgagcacagctacagcgcctcgggcatctaccaccagatcccgcctacctacgacctccacgtgagtccagcccaaagggctgcacaggaggggcctgccagcctggggttctggggtaccatgagcaccttggtgctgggtgggaggagatgcagcccccaccctccatcagctgtcttttcatcagtcaatccatcccatcccacaaagacagccttggcgagggagtcagaccctgcccactggggcttgcctctgtgagtgaactcctggtcagccactccctgggtggaattactcagtgaaggcttggggcagctcctccaaggcagtaaccaggcccagactccacagtcagggagggctgccacagaaatgatgcttcccctaagatgtgtgaggagaagccatgagccagggctgggttgtgtgggtcatcagtgcaaagggcctgtggcaggagggagcctgacaaatttgggccactgaatagaggggcagggaatggatggcagtaacaaggaggctgggagggaagcaagggccacaccacacagtgcctcagaggcctggagtcccaagagcagggacatgcataagggttatgagcaggagtgacaagtggggaatgtgacaagtggggatgtgctccattggagggtaactctgaaggctggggcagagcaagccaggggcttccatgttggcctcctctctcctagggctacctctcctacatcaagagcctcccactcaatgatatgcctgagatctttggcctgcatgacaatgccaacatcacctttgcccagaacgagacgttcgccctcctgggcaccatcatccagctgcaacccaaatcatcttctgcaggcagccagggccgggaggaggtgggtggtgtcagagtaaggggcccaagggctggacgggctgggcttcaccatcctgcccactcccctgtgggaaggacccctatgcatgtggaatcccacaggggataagggggcccagccttgaccccacagtatttctttgcccctgcagatagtggaggacgtcacccaaaacattctgctcaaggtgcctgagcctatcaacttgcaatgggtgatggccaagtacccagtgctgtatgaggaatcaatgaacacagtactagtacaagaggtcattaggtaatcaccccgccatacccctgccccgagtcagcggccactggactgtagagaaatgacaacaggggttactatgggccaggtgccatgccaagtgctacacatcctctaactcagctattttttgttgttgttgttgacacggagtctctctctgttgccatgctggagtgcagcggtatgatctcagctcactgcaacctccacctcccgggttcaagcgattctcctgcctcagcttcctgaatagctgggactataggcgcacaccacctaattagcgcgcccagctaatttttgtatttttaatagagacggggtttcaccatgttggccaggatggtctcgatctcctgacctcatgatccgcctgcctcggcctcccaaagtgctgggattacaggcatgagccaccgcacctggccaactcagccatatttttattattcacattttgtagacgagtaaactgtgaccccaaaatgttccgtaagctatccaagtccaacttcacacatgtgctaagggccagagctgggatttgtacccaggccacctgacccagctctctgctcttagcctctatgttttgccattgtttttcactctgtggccttgagctgcggagcatagctactgccacgtgaccccagcccactacctattctcttgccactggcctcacaggtacaatcggctgctgcaggtgatcacacagacactgcaagacctactcaaggcactcaaggggctggtagtgatgtcctctcagctggagctgatggctgccagcctgtacaacaatactgtgcctgagctctggagtgccaaggcctacccatcgctcaagcctctgtcatcatgggtcatggacctgctgcaacgcctggactttctgcaggcctggatccaagatggcatcccagctgtcttctggatcagtggattcttcttcccccaggctttcttaacaggcactctgcagaattttgcccgcaaatttgtcatctccattgacaccatctcctttgatttcaaggtctgggcacagccagggccaggtcaggtgacaggctagggtacagcccagggaggagaggctctgaggccacggttggttggcagttgggggacccctaagccagggcatggaaagacccaagccagaagaggccatgagtcccaggaacgggtctgggctgggtccatcagaaatccacaggggcagggcacagaccacaggccatgggctaaagtggtaggtacgtgatgatgggcaggcaggcagcattaggcagctctctcagaagggagttttgtgcctcctaacccagattctgggtattgttatgtgtgtggggtgtgtctgtgtctacccacaggtgatgtttgaggcaccatcagagttaacacaaagaccccaagtagggtgctatatccatggattattcctggaaggtgcccgctgggatccagaggccttccagctggctgagtctcagcccaaggagctgtacacagagatggccgttatctggctcttgccaacacccaaccgcaaggcccaggaccaggacttttacctgtgccccatctacaagacactgactcgtgctggtatgaggcctgggatgggagcctacactatgggcggggacccaggactaacccagcccagcccaagccagtcacttatccaggttagctgaacaaggaaggacaacagagatttgggccaggccagcaagcagcaggcaggttaatgcccaaggcctgccgtctggctgtggggagcacccctgaactcctatcctgcatgcctccctcagcaggcccaccttgggccccaagagcctacaagccccagcctgtcattgggagttcagaggggtaactgaggcccagggcaggaacttgtttggactaggtccatcagagaatgaaaagtggcatcaactctgccatccctatcttcagtccccaatacagtaaccctgggcaggcttgaaccctggccagaccccctcatcaggtaggcttcctcttgggtcagggccccctccctgtcctcagcttagtctgcccactgccctgcccctacgctatccctgctagtagtaatagggcatgacctaacccgtccccctccttgcccattccaggaacactatcaaccacaggacactctaccaactatgtcattgctgtggagatccccacccatcagccccagcgacactggataaagcgtggtgtggccctcatctgtgccctggactactagactcagacagaagggctggggccattaaagctgaattttctaagcagtcca

SEQ ID NO: 1072 - DNA, 9320 bp, Homo sapiens
ggagaaggacaatgggctggatgtgttcaagttgagtgaccgcgacttcctgcgcagcatggagaacgccatccgctttggcaagccatgtctcctggagaacgtgggcgaggagctagacccagccctggagccagtgctgctcaagcaggtgggtctgcagtggtgatggcagggtggcagtaggcctggacagggcagtccccttcccctgccccactggtgatgctcaggccacagtacccaccggtcccacccaccacagacgtacaagcagcagggaaacacggtgctgaagctgggggacacggtgatcccctaccatgaggacttcaggatgtacatcaccaccaagctgcccaacccacactacacgcccgagatctccaccaaactcaccctcatcaacttcaccctgtcgcccaggtgagcccccactcttggggacgcccaagcatcagctctgcctctgcctgcccagctgctcctctcccacccccaggccgggagtcagtgggactttcccccactcaaagtctccaccagtttcaccccaggcactcacattcgaagcctttctagcacttccaccagctcctcctacccactactgtttccacctaagaaccttcatccccacctcatccagatccctggtcagggtccccagcctctgtgtctagcaccagcctcacctcctccagggaccccttctctcctactgagccctcgccaggccctgtgccctcatcctcagagctgacccagagccctgagtcgggcacactctggctctttgaatccaaatgccctgcttcttatccttgctgccacgagcctgggcactgtggttttcgctggccatccatacacagcccacagcccataggcctgctttgtgctaaggcctccatttcagtggtcagtgtgaacctctccacaaagcagggggcaaaaacaccctgaaggcctgccctgggtatcacagcccccacttgccaaggaggtattgtccagagaccccagccgctcacacatccaactgctcagccccttctaggattccaggctgccacccaaggtctcactgagaactgatgtctttgaaggcaggctctgcactagccctgcagcctgagatggaggctaggcctcctaggccaacactggcaaggatgctgggctcttggagccccagaagcacaggtggatgggtgaccaggttcacgactagccctccggggcccaccaggtattacagacttggtgtcccctgcccccggcagtggcctagaggaccagctactgggccaggtagtggcagaggagcgacccgacctggaggaggccaagaaccagctgattatcagtaatgccaagatgcgccaggagctgaaggacattgaggaccagatcctgtaccggctcagctcctccgagggcaaccctgtagatgacatggaactcatcaaggtgctggaagcctccaagatgaaggctgctgagatccaggtcagctgctgcctgcccacccacctgccccgggagtgccccgggcctgccccccacctctccctgcctgccctaggcctgccccccaaaccccctaccttctgctctttgacccctccccccacccactacacccacaggccaaagtcaggattgcagagcagacggagaaggacatcgacctgacgcgcatggagtacatacccgtggccatccgcacccagatcctcttcttctgtgtgtccgacctggccaacgtggaccccatgtaccagtactcccttgagtggtttctcaacatcttcctctcgggcatcgccaactcagagagagcaggtagcaccggcatgccaggctcctaccctgcacagatatgacccatgtggacacatttccactgtggggcacacacaaactcacaactgtgttcactggcgtacactctcctcttagactcacaatacataagaatgcacacagcacgcctaccctcctccgagccccttcactgggaacaccaagtgcccaagaggaggcccaggctgcccctacggctgctggggagactggctaggctgggctggaccccggggctcttccttcctctcacctctccgcgctgccatcacttctccactccacagacaacctgaagaagcgcatctccaacatcaaccgctacctgacctacagcctctacagcaacgtctgccgcagcctctttgagaagcacaagctgatgtttgccttcctgctgtgtgttcgcatcatgatgaacgagggcaaaatcaaccaggtgctggcagagacacccaggacagactgcctgaggggtggccctgtggcagggcctgagaacagggtggaaggaaagggaaagccaggcatgaaggcaccgcgagagcaaagtggcagaggaaacaattccttgattaaaagcagccagggccgggcacggtgactcatgcctgcaatcccagcactttgggaggccgaggcagatggatcacttgaggccaggagttcaagaccaccctggtctctactaaaaatacaaaaattagctgggtgtggtggtgcacgcctgtaatcccagctactcaggaggctgaggcaggagaatcgcttgaacccagaaggtggaggttgcagtgggctgagatcgtgccactgcactccagcctggaagacagagcgatattctgtctcaaaataaataaataaaagcagccagaagaccctgggttaattgtgctccaaccaatggctcaaggttcaagaaggccaatgttgtgagcacaggccttctcgagccttgagtgtgctggtgagcacaaagactgtccccagggacggactgtcctgagcctcccacacctgcttggccaggaactcacactctcatgaagccctatgcatttcgtggtgcagcggaaagccctgccgagacagtgagagtgacagccaccactgtcagagccctaactgcgtgcctggcacaggactctggcctgggaagcagtcagccttctgattctttctactcccaaatgaggaggcagaggcccagagaagtcacatctcttgccctaagggcacacagccaggaaaaggcagggtgggaacactaacccagacctgtttgactaccatccccaagggagactcagtttctccaggtgagggtggttagagaggcactactgggtgggggtgcccagagcaggaggagctggccagggcctgggcatcagcctcctcctgtcccctgccagagtgagtggcgatacctcctgtctgggggctccatctcgatcatgactgagaatccggcaccggactggctgtcagaccgggcttggcgagacatcctagcactctcgaacctgccaaccttttcctccttctcttccgacttcgtgaagcacctctcagaattccgggtcatcttcgacagccttgagccccaccggttagctgggccccagaatatggcaggatgagcccatcgaggggatgagtccctaggaaaggcttgtctgggcgccttctctaaggggccacccagggttgccctgtggctgtggccacatctcctctgtgcctccagtgccatacccctgggatagcccactctccccagctgtccggctggccgaatccctggggccaccaacctccttccaacaggctggctctcagggaggtgtgggccactgttgcagggagcctttgcctggcatctgggaccagtacctagaccagttccagaagctgctagtcctccgctgcctgcgtggggacaaggttaccaacgccatgcaggactttgtggccaccaacctggagccacgcttcattgaaccccaggcaagtgctggaaccctggcaggactggcaccttgagcttgtccccaccctgggtcccagggccctggctgcatctggatagactacttggccaggccaggacccctgcttgctccctaaaggctctgaggttccagcccccaccaggaagcccactggggaccactctgagaaccccagatccccctcccttgccccgatctctctgcagccccaggtggtctcagcatctccccctgcccttgcagacagccaatctgtcagtggtgttcaaagactccaactccaccacacccctcatctttgtgctgtcacccggcacagaccctgctgccgacctctacaagtttgccgaagaaatgaagttctccaaaaagctctctgccatctccctgggccaggggcaggtcagggctaggcagggaggaagggagtgggctggggggtgggcaagctggccccctgctcagtgctcttgcccctgcagggccctcgggcagaagccatgatgcgcagctccatagagaggggcaaatgggtcttcttccagaactgccacctggcaccaagctggatgccagccctagaacgcctcatcgagcacatcaaccccgacaaggtgtgttgccctgcccatcacagacccagtggggccgcctctgcatccatcagggactaatgaggcagaaataagagaatcatgccaagcactctgcccagcctctagcacgtggcaagtgctcagcaactgacatgtgccacacatcgacatcattaatcctctcaatccacccccacccccagttacctgtacaagcggtgatgtgacttgtccagggacacccagcacagaccgtgacctgggacttgccaaagcccttttttttttttttttttcagacggagtctcactctgtcaccggggctggggtgcagtggtgcaatctcggttcactgcaacctccacctcctgagttcaagcgattcttctgcctcagcctcccgagtagctggtagtaacccgccactatgcccagctaattttttgtatttttagtggagatggcatttcaccatgttggccaggctgttctcaaactcctgacctcgtgattcgcctgccttggccttccaaagtgctgggattacagacgtgagccaccgcgcccagccaaaagcccaattcttaaccagttgtctgtgcagcctcgcctgacccacctcagggtccctgggcaggagggagcctggtgtcagggtggccaccagatatgggtctcaatgctcacgtggagccatggccaccaggtacacagggacttccgcctctggctcaccagcctgcccagcaacaagttcccagtgtccatcctgcagaacggctccaagatgaccattgagccgccacgcggtgtcagggccaacctgctgaagtcctatagtagccttggtgaagacttcctcaactcctgccacaaggtgaggcacacttggtgcaggcctaccctacctgcccccgtccccgctcctcacctcccctgcctcccacctcccccaggtgatggagttcaagtctctgctgctgtctctgtgcttgttccatgggaacgccctggagcgccataagtttgggcccctgggcttcaacatcccctatgagttcacggatggagatctgcgcatctgcatcagccagctcaagatgttcctggacgaatatgatgacatcccctacaaggtgggcctggggcagactggggcctgggggactgggcacttaggggagccctcacccacccaccccataggtcctcaagtacacggcaggggagatcaattacgggggccgtgtcactgatgactgggaccggcgctgcatcatgaacatcttggaggacttctacaaccctgacgtgctctcccctgagcacagctacagcgcctcgggcatctaccaccagatcccgcctacctacgacctccacgtgagtccagcccaaagggctgcacaggaggggcctgccagcctggggttctggggtaccatgagcaccttggtgctgggtgggaggagatgcagcccccaccctccatcagctgtcttttcatcagtcaatccatcccatcccacaaagacagccttggcgagggagtcagaccctgcccactggggcttgcctctgtgagtgaactcctggtcagccactccctgggtggaattactcagtgaaggcttggggcagctcctccaaggcagtaaccaggcccagactccacagtcagggagggctgccacagaaatgatgcttcccctaagatgtgtgaggagaagccatgagccagggctgggttgtgtgggtcatcagtgcaaagggcctgtggcaggagggagcctgacaaatttgggccactgaatagaggggcagggaatggatggcagtaacaaggaggctgggagggaagcaagggccacaccacacagtgcctcagaggcctggagtcccaagagcagggacatgcataagggttatgagcaggagtgacaagtggggaatgtgacaagtggggatgtgctccattggagggtaactctgagggctggggcagagcaagccaggggcttccatgttggcctcctctctcctagggctacctctcctacatcaagagcctcccactcaatgatatgcctgagatctttggcctgcatgacaatgccaacatcacctttgcccagaacgagacgttcgccctcctgggcaccatcatccagctgcaacccaaatcatcttctgcaggcagccagggccgggaggaggtgggtggtgtcagagtaaggggcccaagggctggacgggctgggcttcaccatcctgcccactcccctgtgggaaggacccctatgcatgtggaatcccacaggggataagggggcccagccttgaccccacagtattcctttgccaaaaacagatagtggaggacgtcacccaaaacattctgctcaaggtgcctgagcctatcaacttgcaatgggtgatggccaagtacccagtgctgtatgaggaatcaatgaacacagtactagtacaagaggtcattaggtaatcaccccgccatacccctgccccgagtcagcggccactggactgtagagaaatgacaacaggggttactatgggccaggtgccatgccaagtgctacacatcctctaactcagctattttttgttgttgttgttgacacggagtctctctctgttgccatgctggagtgcagcggtatgatctcagctcactgcaacctccacctcccgggttcaagcgattctcctgcctcagcttcctgaatagctgggactataggcgcacaccacctaattagcgcgcccagctaatttttgtatttttaatagagacggggtttcaccatgttggccaggatggtctcgatctcctgacctcatgatccgcctgcctcggcctcccaaagtgctgggattacaggcatgagccaccgcacctggccaactcagccatatttttattattcacattttgtagacgagtaaactgtgaccccaaaatgttccgtaagctatccaagtccaacttcacacatgtgctaagggccagagctgggatttgtacccaggccacctgacccagctctctgctcttagcctctatgttttgccattgtttttcactctgtggccttgagctgcggagcatagctactgccacgtgaccccagcccactacctattctcttgccactggcctcacaggtacaatcggctgctgcaggtgatcacacagacactgcaagacctactcaaggcactcaaggggctggtagtgatgtcctctcagctggagctgatggctgccagcctgtacaacaatactgtgcctgagctctggagtgccaaggcctacccatcgctcaagcctctgtcatcatgggtcatggacctgctgcaacgcctggactttctgcaggcctggatccaagatggcatcccagctgtcttctggatcagtggattcttcttcccccaggctttcttaacaggcactctgcagaattttgcccgcaaatttgtcatctccattgacaccatctcctttgatttcaaggtctgggcacagccagggccaggtcaggtgacaggctagggtacagcccagggaggagaggctctgaggccacggttggttggcagttgggggacccctaagccagggcatggaaagacccaagccagaagaggccatgagtcccaggaacgggtctgggctgggtccatcagaaatccacaggggcagggcacagaccacaggccatgggctaaagtggtaggtacgtgatgatgggcaggcaggcagcattaggcagctctctcagaagggagttttgtgcctcctaacccagattctgggtattgttatgtgtgtggggtgtgtctgtgtctacccacaggtgatgtttgagcaccatcagagttaacacaaagaccccaagtagggtgctatatccatggattattcctggaaggtgcccgctgggatccagaggccttccagctggctgagtctcagcccaaggagctgtacacagagatggccgttatctggctcttgccaacacccaaccgcaaggcccaggaccaggacttttacctgtgccccatctacaagacactgactcgtgctggtatgaggcctgggatgggagcctacactatgggcggggacccaggactaacccagcccagcccaagccagtcacttatccaggttagctgaacaaggaaggacaacagagatttgggccaggccagcaagcagcaggcaggttaatgcccaaggcctgccgtctggctgtggggagcacccctgaactcctatcctgcatgcctccctcagcaggcccaccttgggccccaagagcctacaagccccagcctgtcattgggagttcagaggggtaactgaggcccagggcaggaacttgtttggactaggtccatcagagaatgaaaagtggcatcaactctgccatccctatcttcagtccccaatacagtaaccctgggcaggcttgaaccctggccagaccccctcatcaggtaggcttcctcttgggtcagggccccctccctgtcctcagcttagtctgcccactgccctgcccctacgctatccctgctagtagtaatagggcatgacctaacccgtccccctccttgcccattccaggaacactatcaaccacaggacactctaccaactatgtcattgctgtggagatccccacccatcagccccagcgacactggataaagcgtggtgtggccctcatctgtgccctggactactagactcagacagaagggctggggccattaaagctgaattttctaagcagtcca

SEQ ID NO: 1073 - DNA, 1161 bp, Homo sapiens
cggcaccggactggctgtcagaccgggcttggcgagacatcctagcactctcgaacctgccaaccttttcctccttctcttccgacttcgtgaagcacctctcagaattccgggtcatcttcgacagccttgagccccaccggttagctgggccccagaatatggcaggatgagcccatcgaggggatgagtccctaggaaaggcttgtctgggcgccttctctaaggggccacccagggttgccctgtggctgtggccacatctcctctgtgcctccagtgccatacccctgggatagcccactctccccagctgtccggctggccgaatccctggggccaccaacctccttccaacaggctggctctcagggaggtgtgggccactgttgcagggagcctttgcctggcatctgggaccagtacctagaccagttccagaagctgctagtcctccgctgcctgcgtggggacaaggttaccaacgccatgcaggactttgtggccaccaacctggagccacgcttcattgaaccccaggcaagtgctggaaccctggcaggactggcaccttgagcttgtccccaccctgggtcccagggccctggctgcatctggatagactacttggccaggccaggacccctgcttgctccctaaaggctctgaggttccagcccccaccaggaagcccactggggaccactctgagaaccccagatccccctcccttgccccgatctctctgcagccccaggtggtctcagcatctccccctgcccttgcagacagccaatctgtcagtggtgttcaaagactccaactccaccacacccctcatctttgtgctgtcacccggcacagaccctgctgccgacctctacaagtttgccgaagaaatgaagttctccaaaaagctctctgccatctccctgggccaggggcaggtcagggctaggcagggaggaagggagtgggctggggggtgggcaagctggccccctgctcagtgctcttgcccctgcagggccctcgggcagaagccatgatgcgcagctccatagagaggggcaaatgggtcttcttccagaactgccacctggcaccaagctggatgccagccctagaatgcctcatcgagcacatcaaccccgacaaggt

SEQ ID NO: 1074 - DNA, 8984 bp, Homo sapiens
gagggttcatttctcaggagattcttaggagagttttattcattcattgatccagtatttacaggggctagaggggtcaagctgtgctcagcccagaggcagctgccacacttgccagcaccccccactcagtcactatgtacagataaaggggcctgcttggatcacctttttcaaagccatctggcagaggccatggggctgtgttggggcctgggctccagaggcactgctgggcccattaccccttggcatcaggtcctctggaacacaggggctccaacgggttgtcttgatcctgctgtcccccaccctgagtgccttgcagaggctgaggaaactggagtagcaggaagagctgagtggtgccagcttcctataagcaaccctgtctctgctacccctgagagggagacatggtaatactgaggggctggacagaggctcttctgagcctcaagcgccagggacagagacctagagcccaatttaggcccatagctagggccacaacactgaaggcgaagagccctagaaccttgctatggagagcagtcttgaacagcctggctagaacaaggaagacagttcacaggccactgaacagttcccacatgctctgctcaggccatgggatcccagcagcctgctcaccccaaccccactgggacaccctactcccaacccagcccagtgctgggtccctgagtttggcactctcctaagaggaatgaagagagaagacctggcttccttacaacagggacaggctggtggctggggctagagcagcagggcccagagcccagggcccacccaggcccccagctaggaccctgtagttgagaccgtggcatgatacaaggacctgggcccaccaggacagctcctaggagagaaagcatagtcaggtaggaacttatgtcaacatggtggcatgttgggttggagcccagaaaaatagatgtctctgataggtaaaatatatattctgctgcccaggcagaagggccaggtcctgctgctccacagccggctgtggaggaagctgcagtacctcgctgtgccccaactccagatgctgcctcctgagcactatggggctgatctgccgtgtcaggcctcagggcacgatggaaggaatgtggcctggttcctcccattcccagggcctggactctccagctgggactattcagtaatactgggaaaaggggaagtggggcagggaaggaccctggtgagggccacacggcaagagtgggctgcagagtcagggccagcagtcctcactggcgcttggccttgtaggggcgagagcgtttccgccggtcaggcttccgctgcttgtggagccggccgatgctgaccccttggcgccgccgcacggagatgttctgctccactaggttggccagcatgcctgcgaagaggtagagacccttgagcaggtgctggctgcctcaggccaggagctgaggctctcatggccctccctgtgccccaaggtctgctcaagcctcaggagaggccaggggaggggagctgaaggacacggccctcagcagggcattccagttaagacagcagcgcatcccctcaccttcctgagccagcatggagataaaggtgcagatgaactcatcgtagttgtgggtccttctctggtcatcaatctgtaggagagaagaagactgagagcactggagccaatcttgccagagcagccaccagtggacctcgggagaggccagatcaggcaactggagaaatcacccaccttgaacttcttcctcttctctacctcctccttgaggcacgcctcatagtttgcaatctcagcctccacacacttcagcagtgccagcagctcctgccaaaacccagcattgcacctctgatcggggcgggccagcaacaaagccccacgagcaataggcagctagaggcaaggatgagcagcgagtccatgcctatcaaggcccctgccaccacccaacccagaaagtcttctggcacatggctccagccaccaatcttcacaccaaagttccaatcaagaacttggcacctgggcaggaggagctcaggccttaccctctgccaggattaaaggagaaaaccacaacggaggctcaccttgggtgagtatttctccccactcaagggctcgccaggcctcaccatccccgtcttctctctgctgtccgtggcttccacgacctccttctccactgggctgctggacccctggctgccttggattggtctgatggagggcgaggaacccttcccaccctctgggaagagaggtcacaagaaaatcatcagagtgcaggacactttgtggtcacttggccacttccctcctccctcctgggtgcaccaagtggccagtgagccagtccaaggcccacctgtcagcgccaggggactcagcaccccatcctcagccaggtgcagcaggcctgtgctgatgacaggacccagatcacggacagcacggttgtagcgtatgcagtcaacacgcagcaggctgtcatcctctccaaaaagcaccttggagatgtgggaggtgacagggctggagggccgcgtcgggttggctgagcggataggcgagcgcagtggcgagttgaaagcactgccgatctcagaggccgtgtctgtactctcattgctgggggtgggtgagggctgcgagtgtgtgggcactgccacagccggactcccagccccgctgctagtcttgatggacagaggaattgagaggtccttctgggactctttgagcttctcagccaagacgttgatggtgttgggctgcagcactgacagttgcccatcagcagaaccgctcaatgcccctggcttccctgttcccttccccttatacctgtggggcccgagaagatgtgaagcaagggaacgggccaggtgaccatacccagcagtacccagaatggcttaaatacatcccgacctccaggggctgaccctaaaactccttatacttggtccaagcaacttgaactagccatgctaagcctggcatcaagttctgacagctgcagccaagtgtcctcaaaagacacttcctctattccagccatcccactcctggccttttgccaatgccctgtgttccagcaaagctgcctccccaccacccacatctcctccatccctgccccaaccaatccttcaaggcctggctaaaaggccacttccaataggacatgatataagcttacgtgctcagccttaccccccagcccaccaaaaacttcctggggacctggggtcagccccatcatgccagcctcccccagggccccaaactccgcaggtgctcaacattatctgctgcagggcattctcagacacagactgagatattcaggatgggatccgaagcacctagaacctggtagccttagaaagctgggctgacctaagggcagagttggtgttctgcacgtcatcctcctcgtcatcctcatagtcatcctcatcatctgagtactgctggggtgggcggactggaactcggctgcggcccacacctgccgccaggtcttcttcctcctgggacaaagaccagggcagttacaaacaagtgctgctcggcccaggctgagcctagacactcacagccagagagaaagccaacatggttttccagactgagtcagcggaacccctccagctgttccatggcctgtccttggcttgtggggaggctgccacccacttacactggatagaaccccacggaggggttttaagagaaacagagtgccctgaaacacatgcctttattttgccagtaaaacccaacccatgaagttgtaccaaggagcgtgacctaaacatttaatcccacagccacgtaactagattaaattcaaaggagctctccctgcctccctaagctcctgctgttgtgggggccttttcatatcaggcagaggaacctagcaacccaggcccaggcagcttgacccagccatgccaaggatgaacaccaaggaaccacatgggaaaattgcctgttgcagcctctcaagagaatcaagtagagaatcctgcaagggtgctcccagcttacctgcatgggggacttggcataattgtgattgtctagaaaggccggcagccgctggacaatgggagtggggttggggtgaaccccattgaggctgctgcctggaggcttcaccactagcttgggtttgttgggagggctgtgggatggggcttgtgcgcatgaaccagccgcctcctctgcaccatctgagacagggcaagaacacaggcaggacctccagtaggatctccaagaaaagctcacagtctccccggccctgtgaaccagcacttcccagagaagaacagcccagccagctggtgcaatgggagtcagcaagctctaagtcatgatcccgcaatgagacagggcaaagaatgagatgggaaaaaagaagcaggaagaaaaaaaaaaaaaaaaaaaaaaaaaaccgcctctagagaaaacaagaaagggagtgtacattacagagaagggcccaggggcctgtggtaacagcggccctttacaggtgcctttctttagggaaggactgctctccctctaccttctgacgggggaagaacactgcccaaggacatccccagaaaaagactttccctgtttaggcctcccatgtcagacattagcgggtggctctgaggtccacaagaggtcccaaaccccccagtacctgtgtggttgccctcagaggctgcaggggccctgtttgcttccagcaccagcggggacttgttgctggctgacttggactcctcaggcagctgtgactcttgagacttgtgggtctgaatcagctctggctgtgttactcttatcagctaacaacagaatccagggctcagaggagaaagggtagacccgggcttctaccttaaatagctaagggctgaggacctaaaggaataatggccttggctctacccattcactcacagggaaataaaacacccaaacccaaacttccttttagaagctattctccctccccactccaagtcccacctttcccacaatgggggcaaagaaaagatgtggttagctgaagcccagatctacaagagagtatgttcacgaatcagagacaaatgctgtgggggaagggaggaggaatgcagggagggttgggctgggcagaggccaggaagaaagggcacctacctgctgcagagcctctagtactgtctgacggttcaccttcagcacatgcagcctggcctcatacttgatcctgcggtcgggcaccactgccatcaggttgaagcggatgtcgtggtagggctccctgcagtcacagccgcagccgtgagagcagctcccgccccggccccgccatcaggttgaggcagatatcctggcagggctccctgcagtcacacctgcagctgtaggtataggccccaccccaacaggcaggcagcgactagccatacatgccaggcacctgagctggtaccttccaacaagctgtatgaggggcctatctggaagtgaaccagcagacctgggctgcctaaggctccactgaggcctgcccctcccccagcccacccaggagcaggccacaggcagcccaggcaggaaataagacaacaagttgagaacccatgatctaagcctgatcttgccagattcaccatatggccttgcaatttacaaatcacctggatactctctgtccctcccaaagtaggtacagctccagagagtagaacagggcaggcacagggcccttaccctgcagtggcgaggccgatacgctccatgatgacccgccgggccttgtctgtccactcctcgtcctccccccagggccctagtggagaccaagacaaggaatcagcgagaaggaaaccctgagtttgggcaggccaggagtgggaaggaagacagagaagagcagttgagccagggaatcaggagctggtcgggcaatatggtgtagggtgaaaccccagccagagccgggtgtcggtaccgacaacccctgccactgggtaccacataccagagggccctgagccccagctccctaggaggtaggcagagacacccaacaggcctccagctcatggtgcctaccatggtcaatggggtagaccttcagcccatccagctcaaagagccggcctgtgataggcacatagctgacaaagtggaacgcctccatggtccgcactgcactaaggccattctgcttctcagggaggtggcgtggctcgggcctggggaaaaacagagtcagggcccaaaaaatgatactccccctactcccaccccacatcagctcccacagctcccacacacctggcatggctattatgggccttggccaactccggggcattgccaatcgcatatcctttgctctacggggaagaaaataaggccgtatcagaataatttctcctcaggtaggactatgggtggaaggcaaagcttcagagagcagcctggaggcattccaggaatcggaaggaacacagacgaactttctttaaaggctggtgggggcagaaaagagctctggagccccaaagagatggactgtgctggccttgcatggtaattagtggacactaggaagcaacatggcctgagaggaaaagtcctgacagagaaggttctgacatggtctgacttaaggaaactctcctccctccctaggcctgtgtcctttccccgcaactgcatctaaaaacaatggccttacacaatttatttaagagtcaaatgtaacataaacaatcatttgaaaaagaaacagcctaatagtacccaatatcatgtggtagcattcccagtggccctcagggtcagatctgcccagttggctgtgagccaggatgaaggcactgcagcctacctcagggctgaaacccttggtgaagtccttcatgcgactcagggtgggtcccaggtccacgctgctgcagttcaggagcacgctcagcaaggcatgagttgcacaagagttgggtatcagctgtgaaaccaagaatagtcacccatacacagcacccctcactgcaagccccaagcccatatacatcaagaatggggatccagagcaggtcagtcatatctggacaactccccttctcagctcctttcatctttgcctaatgtttattcatttaacaagcacctaccaaatacccactggatatctgaggacacagagagtggactcagacaccctcctactctaaagctgttccctttaatgaattaagagttcagttccttctgccagaggatttctgtagctaccacccctagaatctgcctatctcctcctcctgtcttcctccatttccacttcccaagcaaaaacatggcagcatcccaccctccaaacaaagcacagagtccagcagacctggtgggcaaagaacatgttattcacaatatcatcatcaatcacggacgtatcatccaccaaggtagagacctttcgccgggaccggcgctcttcgatccatttgaacaggaagataaatccatatacagggctgggggaagtaaggggcagagccagatcagccaaaggggagaagacaatcagcattcccttctttctcccattaatcctttgcactgcgtcatcactcaggtgtccttgctgtgatcccccctctcccctggcttcttcccaacactgtgtctgaagtggccttgtgccctcacacaccaaaggcctgccacaggcagagcaaagcataagcctctgactgtgatgctccaggagtccacccagtctccttatgaagtctatagttctgggtaagagaagaaaagctggaactgagggccaaggatgggacagggtaggaacacaaagtaagacaagaacaaaaactctgatgaggaactgaggcactccttctcacttgtgggccccaatgcagtcaggaaagcaaatgaacacccacaccagtctcttttgttccaggaaattaaagtagacttcttggttcagtcacggttgctactgttgctactctcttacacatctattctgcaggaccactgggaaaagactctaagtgtgggcacccaggaggggccttgtcaccccaaccaatcaatacaggatgactttgtgtcaggattaaagccaaggacacatgggcacactaaaattaatacattacacaactgcacaaaaggcattgtgtgaccggggtcttcccgctgcaaggccaggaaagcagctgaaccaaaggatgcttaggggtggggagggggctgctacaaaaagggaagcgctaaggaaagtttgggagaaaagaaagtatcagtttgatcaggagcgggcactcagagagcaaggctgctgctttctgtgagattttacaacgtagggttcctggcactgtcttccctaaggggccctgttctctgggaccttccccagcactctgggtgtaaggggcagccctggtgtacagccactcacccctgacatttgctctgaaggtcgtagatctcctccacttgcacccccttgacacctgcgatgaggaaaggaaagcagtagggaaggacagcccctgatgagtgagggcgcaggggtgggccgccacagccccggtccggcagggagaaaaggctcttaccgaaatcttccacgagcagggtgaagaggcctgggtggggcgacaagaggagggggtgatggtcaggcaggcgcgtcccgggcccatccggcctccccagcccctggccctcccggtcccctcctcacctgggtcgctctccagctccagccagcccttattcatcttcccgcggggcggcccctcagcgccatgtccaggccctccctccccaccgctgcccccaccgggagcccccaccgcccccggggcccctcagtcccacacacaga

SEQ ID NO: 1075 - DNA, 423 bp, Homo sapiens
aaaaatattaatatctaatcatatatttcattatgttaaaaattcttacttacctttttctttcccagagagagtttaggaattttctcaggtgtgttttctgtaggtgatttcaaacagaattccaaggctcagcttttagaatgctacagaggaaaataatagggaaaatctcctttgattttggctgtagaaaatgaatacatttccacgaggaaatattgtagataattggtgagttacataaatttataaaacattagttcctctttctgcagggtaaattcctgagagtgaatatctctggtctgtatcctgttatcttgatttctgagtttcatactaaatttcatgagatgaaacttggtacctcctacaagtttttccctatgactaattgtttactacattatttttaataga

SEQ ID NO: 1076 - DNA, 2081 bp, Homo sapiens
ttctggttatgtaatcagagcttaattggccatttatagttagttggttaagcttaaattttgttttccccaatgcaatttacaaaaatttacaaaaaaaaaaaatatatgtttgaggatacacacttcacaagagactgattttttttttcccctgaattttttaaatgtgtcccaagtgcggtctcaagtctagccctcatcccccattcctccagcctaactcaggcttgaagtaaaatactaaatttccagttccttctgacaatcccaaatgccagcctcgtttccctagttcacattgtcatctatttgtcctttagtgtatattttcaatactgtatttttttttacaaaccactggatggcacattttaaaagattcattttctgtttgtaaatatttcccatgagaagaaagcaaagaataacccctgacactgtgttgtgtaaaatctctgtgcctcttttccttttaccttccctaggcagagatcttaccagaatgctttggggtaaaggtttttttttggcggggggaagctttattgggtgatgtgtcctcaaccaccctttagttttttcttggtcatcggtttcagtactgtctgtgaataaaccattatatcagccatggctatgtctgctagagtgtctagggaatctcaggtcctgggtcattttctttcataggacagcctgaggtatggagtgtagcctctcaaggaagcagatggatgcactggggctgagagaaatctcctggtgtgctcttcctttaaaaaagtaaccccttgagacattaacattgttttcacccaacccagctttcatatcttggtgacacattgctggtcagccaatcagaggctggtattaaggggaaaacagaaataatttctgtcccctgaattctctaagatttgtgaaagaaaaaatagtatcccccctaaaaaaaaaacaaaagaaaacctgaccccagagagatgctgcaaaaatttccgaaagtaaaacctgggccactcactggaacatagtgcagtgtctcctgagaggttagtcattgagcagttaagtgagcaggctggggtgggagaatctctcacgtgattggatgacctgacttgacacataagtcagacacatctgttttttaatcatcactgctacaccctgggttcgtcaccttgaaaagatttgttcacttatattgatttcaatttcttaaactgtaaattgcattttattagtagagcttgaaaggttcaaaaacatttacaaagggcataaaagtggtgggtttcaaaaaatattaatatctaatcatatatttcgtatgttaaaaattcttacttacctttttctttcccagagagagtttaggaattttctcaggtgtgttttctgtaggtgatttcaaacagaattccaaggctcagcttttagaatgctaccaaggaaaataatagggaaaatctccttcgattttggctgtagaaaatgaatacatttccacgaggaaatattgtagataattggtgagttacataaatttataaaacattagttcctctttctgcagggtaaatttctgagagtgaatatctctgttctgtatcctgttatcttgatttctgagtttcatactaaatttcatgagatgaaacttggtacctcctagaagtttttccctatgactaattgtttactacattatttttaatagaaataatacaataataaatttattatctgaaagaaatagatacttttgctgttcttattgaggtataaaatgtaggccaggtgcgatggctcatgcctgtaatcccagcactttgagaggtcaaggcgggcagatcacgaggtcaggagttcgagaccagcctggccaacatagtgaaacccgtctctacgtaaaatacaaagttagccaagtgtggtggcatgcacctgtagtcccagctactcaggaggctgaggaggcaggacaatcacttgaacccaggaggcagagtttgcattgagccaagactgtgccattgcactacagcctgggtgacaaagtgagactctgtctc

SEQ ID NO: 1077 - DNA, 423 bp, Homo sapiens; identical to SEQ ID NO: 1075

SEQ ID NO: 1078 - DNA, 256 bp, Homo sapiens
caattctcctgcctcagcctcccgactagctgggattacaggcatgcgccaccacgcctggctaattttgtatttttagtagagatggggattctccatgttggccaggctcatctcaaactcccaacctgaggtaatccacccgccttggcctcccaaagtgctgggattacaggtgtgagccactgtgtccggcaccttttttttgagaacaagaagaaaatgtgcagagtctgtgtctggctatgtgataggt

SEQ ID NO: 1079 - DNA, 1839 bp, Homo sapiens
ctcccctctccctctcggtctccctctccctctctttccactgtctccctctgatgccgagccgaagctggactgtactgctgccatctcggctcactgcaacctccctgcctgattctcctgcctcagcctgccgagtgcctgcgattgcaggcgcgcgccaccacgcctgactggttttcgtacttttttggtggagacggggtttcgctgtgttggccgggctggtctccagctcctaaccgcgagtgatccgccagcctcggcctcccgaggtgccgggattgcagacggagtctggttcactcagtgctcaatggtgcccaggctggagtgcagtggcgtgatctcagctcgctacaacctccatctcccagccgcctgccttggcctcccaaagtgccgagattgcagcctctgcccggccgccaccccgtctgggaagtgaggagcgcctctgcctggccgcccatcgtctgggacgtgaggagcccctctgcctggctgcccagtctggaaagtgaggagcgtctctgccccgccgccatcccgtctaggaagtgaggagcgcctcttcccggcagccatcccatctgggaagtgaggagcgtctctgcccggccgcccatcgtctgagatgtggggagcgcctctgccccgccgccccatctgggatgtgaggagcgcctctgccaggccgcgaccccgtctgggaggtgaggagcgtctctgcccagccgccccgtctgagaagtgaggagaccctccgcccagcatccgccccatctgagaagtgaggagcccctccgcccggcagctgccccgtctgagaagtgaggagcccctctgcccggcagccgccccgtccgggagggaggtgggggggtcagccccccgcctggcgagccgccccgtccgggagggaggtggggtcagccccccgcccggccagccgccccgtccgggaagtgaggggcgcctctgcccagccgcccctactgggaagtgaggagcccctctgccgggccagccaccccgtccgggagggaggtggggggctcagccccccgcccggccagccgccccgtccgggaggtgaggggcgtctctgcccggccgcccctactaggaagtgaggcgccccgctgcccggccagccgctccgtcagggagggaggtgggggggtcagccccctgcccggccagccgccccgtcccggaggtgaggggcgcctctgcccagccgcccctactgggaaatgaggagcccctctgcccggccaccaccccgtctgggaggtgtacccaacagctcattgagaaccggccgggatgacaatggcggttttgtggaatagaaaggggggaaaggtggggaaaagattgagaaatcggatggttgccgtgtctgtgtagaaagaaatagacatgggagacttttcattttgttctgtactaagataaattctgctgccttgggatcctgttgatcggtgaccttacccccaaccctgtgctctctgaaacatgtgctgtgtccactcagggttaaatggattaagggcggtgcaagatgtgctttgttaaacagatgcttgaaggcagcatgctcgttaagaatcatcaccactccctaatctcaagtacccagggacacaaacactgcggaaggccgcagggtcctctgcctaggaaaaccagagacctttgttcacttgtttatctgccgaccttccctccactattgtcctatgaccctgccaaatccccctctgcgagaaacacccaagaatgatcaataaaaaaaataaaaattaaaaaaaaagaaaggttcaaaaa

SEQ ID NO: 1080 - DNA, 1574 bp, Homo sapiens
gtgacctgcaggtattgggagatccacagctaagatgccaggaccccctggaagcctagaaatggtgagagtgccgggtccgacatcctgagaaaagggaaggagttgattggaactggtggcaagtggctgtggtgggactcgggtctcccgtcagtcagctccacagtctgcgccccgagttctccttggccaactcagcctcagtcctcttcagccatagcatggtggctgcgctgacagcaggaccctgggctgaaggtgtgggttgcccctccacacctgtgggtgtttctcgttaggtggaaggagagacttggaaaagagaaagacacagagacaaagtatagagaaagaaataaggggacccagggaaccagcgttcagcatatggaggattccaccagcctctgagttcccttagtagttattgatcattcatgggtgtttctccaagagggggatgtgtcagggtcacaagacaatagtggggagagggtcagcagacaaacacatgaacaaaggtctttgcatcatagacaaggtaaagaatcaagtgctgtgcttttagatgtgcatacacataaacatctcaatgctttacaaagcagtattgctgcccacatgtcccacctccagccctaaggtggttttttcctatctcagtcgatggaacgtacaatcaggttttataccgagacattccattgcccagggacagggaggagacagatgccttcctcttgtctcaactgcaagaggcatgccttcctcttatactaatcctcctcagcacagacccttcatgggtgtcgggctggggggcggtcaggtctttcccttcccacgaggccatatttcagactatcacatggggagaaaccttggacaatacctggctttcctaggcagaggtccctgcggccttccgcagtttttgtgtccctgagtacttgagattagggagtggtgatgactcttaaggagcgtgctgccttcaagcatctgtttaacaaagcacatcttgcacaacccttaatccatttaaccctgagtttgacacagcacatgttccagagagcacagggttgggggtaagattatagattaacagcatctcaaggcagaagaatttgtcttagtacaaaacaaaatggagtctcctatgtctgtctactttctacacagacacagtaacaatctgatctctcttgcttttccccacactgggcgtcctgtctgcacagtgacccagtgatggtcccctggcctggaggcctctctgggcagctctgcagccgcagcgccttgtctctggccaattgtgcagggaccatgggagggtagtcaggggagaatcccgactcgggtgagggttcatgaatgggaagagttttggtcggtggggttcctagtccctcttttcatctattaaaaatttatggagtcaccgcaaaaagattaaagaatttaatcaaagagtggctcaaaaattgtagagtacccagctatgggttttagtttgtggttcatgggaggaacttgaaggaaagacttttataaggtccatgatt

SEQ ID NO: 1081 - DNA, 2159 bp, Homo sapiens
ctcccctctccctctcggtctccctctccctctctttccactgtctccctctgatgccgagccgaagctggactgtactgctgccatctcggctcactgcaacctccctgcctgattctcctgcctcagcctgccgagtgcctgcgattgcaggcgcgcgccaccacgcctgactggttttcgtacttttttggtggagacggggtttcgctgtgttggccgggctggtctccagctcctaaccgcgagtgatccgccagcctcggcctcccgaggtgccgggattgcagacggagtctggttcactcagtgctcaatggtgcccaggctggagtgcagtggcgtgatctcagctcgctacaacctccatctcccagccgcctgccttggcctcccaaagtgccgagattgcagcctctgcccggccgccaccccgtctgggaagtgaggagcgcctctgcctggccgcccatcgtctgggacgtgaggagcccctctgcctggctgcccagtctggaaagtgaggagcgtctctgccccgccgccatcccgtctaggaagtgaggagcgcctcttcccggcagccatcccatctgggaagtgaggagcgtctctgcccggccgcccatcgtctgagatgtggggagcgcctctgccccgccgccccatctgggatgtgaggagcgcctctgccaggccgcgaccccgtctgggaggtgaggagcgtctctgcccagccgccccgtctgagaagtgaggagaccctccgcccagcatccgccccatctgagaagtgaggagcccctccgcccggcagctgccccgtctgagaagtgaggagcccctctgcccggcagccgccccgtccgggagggaggtgggggggtcagccccccgcctggcgagccgccccgtccgggaggtgaggggcgcctctgcccagccgcccctactgggaagtgaggagcccctctgcctggccagccaccccatccgggagggaggtgggggaatcagccccccacccggccagccgccccgtccgggagggaggtgggggggtcagccccacgtccgggagggaggtgggggggggggtcagccgccctgtccgggagggaggtgggggggtcagccccccgcctggccagccgccctgtccgggagggaggtgggggggtcagccccacgtccgggagggaggtgggggggggtcagccccccgcccggccagccgccccatccgggagggaggtggggtcagccccccgcccggccagccgccccgtccgggaagtgaggggcgcctctgcccagccgcccctactgggaagtgaggagcccctctgccgggccagccaccccgtccgggagggaggtggggggctcagccccccgcccggccagccgccccgtccgggaggtgaggggcgtctctgcccggccgcccctactaggaagtgaggcgccccgctgcccggccagccgctccgtcagggagggaggtgggggggtcagccccctgcccggccagccgccccgtcccggaggtgaggggcgcctctgcccagccgcccctactgggaaatgaggagcccctctgcccggccaccaccccgtctgggaggtgtacccaacagctcattgagaaccggccgggatgacaatggcggttttgtggaatagaaaggggggaaaggtggggaaaagattgagaaatcggatggttgccgtgtctgtgtagaaagaaatagacatgggagacttttcattttgttctgtactaagataaattctgctgccttgggatcctgttgatcggtgaccttacccccaaccctgtgctctctgaaacatgtgctgtgtccactcagggttaaatggattaagggcggtgcaagatgtgctttgttaaacagatgcttgaaggcagcatgctcgttaagaatcatcaccactccctaatctcaagtacccagggacacaaacactgcggaaggccgcagggtcctctgcctaggaaaaccagagacctttgttcacttgtttatctgccgaccttccctccactattgtcctatgaccctgccaaatccccctctgcgagaaacacccaagaatgatcaataaaaaaaataaaaattaaaaaaaaagaaagg

SEQ ID NO: 1082 - DNA, 445 bp, Homo sapiens
gacacatgtaggatatagaggttttcagccacatactcaattgaaacaacttgagttgcacatcctttgttggtctgattgggaatgcaatttattgacactgttggtcaaagccatatctacagggatcaggtagtcaggcaaatgagcaagacaagctgcatagaaaaataatcatcaggcccttttagtttgagttttgttgtacatatttggataaatgtacagatacagaaatagccacagaccataggaaagcaactgtctaagagaggtgccggatgacaactggtacacacagtctcaaggatggggattcagtagggagtggtggggactatggggagctggaatgagcatgtcactaacagagatagccactgttccgctccagcccttgttgctatgtaggcatgtgggcccagtgttttgctatgagaatttc

SEQ ID NO: 1083 - DNA, 589 bp, Homo sapiens
aaacatgtgagtctatagccggccttttatggggtgttcgatgcatcccagttgttcttaaataagcaaagagaaattgcatcctctaggccggtggaagcttgcggcttttcattttctgcctctttttgggtattgttgctttccttttcactttgctctaataaggaatgttctctctagagcaaaataaatgccaatcttatgcgtttctgaagggagagctattgtggttggaaactactgaataattctcagagtattattttgtcattattactcaacctttactatcatattcctgatgttggctgggacctcctggtcctctgaggcacatagacaaggtcagggccagctcccatcacgtcccatactcggaaaggaaaaacctgcactgaaacttctcctctcctccagtgggcagcagggtgagcggtgactcagaaggtgggagctcattctcatggcttctttgcatcccaggggacacctgccttgcctgtgggctattttgccccatgttgaaccagatggaaaaaatctttttctttacaaatcataaatttgccctgttcacatacaatgt

SEQ ID NO: 1084 - DNA, 1889 bp, Homo sapiens
gggatgtttaggggaatccttggcttctacccacaagatgccagcattcaatgctgatagctgcccctcccccagttgtgacagtcaaaaatgtctccagacatggccaggtgtacctagaggccaaaattgtccctggttgagacccactgatgaatgtgtgcaatagtggttcccataaactgcatttaaaaaacagctgttaggtttcgtttggctcaagggctgtcatttttcactcctccccccatagagtatgtaaaatgattagaaatgacaacagactatcatttagtatcagattagtgtgtgtatatgccataaattatttccttagcaattcctttagtatttttgttgcaataattctttaaacgctacatttgtaatgctgtcttggagcctaggaattatttttggagatatttatgcagacttccctctataatgatcggttttttattatggttaatccataaatattttgagatgtatctctaaaaaacgagcactctttgaaaacataaccacaatgccattattatacctacaaaaattaaccacaattccttaaaacataatgatgcctttttgaagagagatatattgagacttcattctggggagaaacctttcagataactttatttaccttttcctttgccaagcatacaacattagatttgaaatatgctttgtatcaagtggaagtgtctcttaagatagcccctagaacaacacatcaagaggcccaccaaagaggaccagagaaaggtgactgaaggagccatactcaggcagggaaatacggagagaaagcagaggaattggctcctaatgcttcactgtacttaatgaaatagatactccatccttacagacataattggaagtaagtcaagttcaacttctttgttttatatggagatagaacagtttcaatcacgtgagtattataagtgtgaattatctaaagtaaagctataaatccagaatatataccagtatctctagaatttttcatattactacatttacttaaaaaaaaagctggcctctaactcttaagtcctgtatgactgatgggcagaaaaagagtgaggtatacactgtttcttaaaattgttctaccatgtttctatggtcttagatttcccaagaatttgaatttctccaattgcttatttccctgaaagacatgactatgacttttctctgtagttcctgcctcagtgatctcatacagtctttggcttaaaataccgtctctgtttaacagctgccagattcacatctccagcccagacctctcccgaactccagccttgttctaacctttgggccgtttcactagctgttgcagatgccctatacccttaccttctcatctttgctcaattgttgccttcttactgaagcctatcctgtccatactatttaatactgcagctgtctaccttccagatcgagaaatcccatacccctttcacctgctctatgtttttcatatcacctatcaccctagatacttcacatatttgtgtttattgtttactgttgtttcccctggctataatgtaagctccatgtgggcaggggcctttgtttttttcactgatatatcacaagtgcctaaaacagtgcctgacacgcagaagggactcagtaaatatgtattgaatggttttgatttgaactgaattgaactatgtatccatgatgcaagtaaagaaatgtaatccatatactttcctacctacattttatatgtgaggaaatattttttgtttcctttttcttttctgtgcaagtggaccaatatttgagaatcgtatacctttgagaatcatagctgatatactttaagataaaagggtatttctgtgtta

SEQ ID NO: 1085 - DNA, 6775 bp, Homo sapiens
ggaactgttaaccttcaaggacgtatctgtggacttcactcaggaggagtgggggcagctggcccctgctcaccggaatctgtaccgggaggtgatgctggagaactatgggaacctggtctcagtgggtaaggatgggctcctcttgaaaatagaacgtacctattggatgaaaacctttgtttctaaattaagtgctttgtttgggctttcggttctgtattagaggttttgtgtttccttctgaacacccagtcaggattgctatgctcttttctgctctgttctttctactctactctgctttctttagaaggcccgaataccaaagaaccatatttaaattcttgggatggctctgtgacctcagcatatacagtcttttcttccccataagcaggatgtcagctttccaaacctggcgtgatttcccagttggagaaaggagaagaaccatggctgatggagagagatatttcaggagttccaagttcaggtaagtgcaaggcaggtggggcctttgtgatgttagccagagaattcccctcaaggccttctccaagttgtggggaagactgaggccatgtggatggtacattcaagaaagttgattctgttatctctgtcacccttttcccacacttccatcttctcattagtctctctggagtcagaggaaaagagatgcctttctcatcagagttaaccttcttcatcatttcttttgatctgagcttcatgatttttacctctttctccaatattctaaaccttgctctgatcatagtttctttcccatgtacatttagatttacacaggtctctcctcattaaacacagtccacttcactggactgtcatgtcattttaccatcggtttcactgtctctcaatgatttcattttcaatatttttctaatccttattttgtgatcacagtttcagttgcaactctctcattttaacttgtgtaatttaacttttcatgccagaaaatttatggctctttgagaaatcaaccacagaattcgttcttagcagatccagtggcttttaacagtcttctttaacatttaagtacagtaataatgacaggtatttacctgggttctctgtgaatgatagctgggttctctgtaagtcccacattagctctgtcttacacatgaggaaaaggaggctgattaagaaatgtatacagggcagttagctactacttggtggactcaatatcttaattctagtcattctgacaccacagtttgtgtgttcttatggcactattttacacgactgcattagattacacatgtagacctcgccaccttaatatcctttcctctatcaactagtttaataatttttgtctcctctatttctctcattgctttttcagtgtttctcatcagtgtcttttttaatgcagatacatgatttctgcctaggtcaggataggctaaactactgtaataaatcgactccaaaatttcacaacagattttgagctgtaagttatctcagacagaatatgaacttatgccttgatcatacactgatctggagaaattgtttttttttttttttcttttttgagacagagtcttgctgtgtcacccaggctggagtgccgtggtgcagtctcggcttactgcaacctccacctcctggattcaagcaattctcctacctcagcctcccaagtagctggggttacaggtgtgagccactgtgcccagctaatcatttttgtatttttagtagagacggggtttcgctatgttggccaggctggtctcgaactcttggcctcaagtgatctgcctaccttggcctcctaaagtgctaggattacaggcatgagccactgcactgggccctggagaaattgtttaggtcgctggacagttcctcttcatctggtgattcagaaagattcttctgccttgtggctcctctatccactagggtttcctcatcatctgcatttagacagcatagaataagtgaggagttaggatagaataagcaaaggagttcatttgggaggtttttatgggccagtctaaggtggttcacatcactttcactttcattctcttaacaggagagacctttgtgacttcactcaatctaattcaagggagattgggaaatatcatctattcgtatgtccaaaatcggggtgaacagagtttagggaataaccagcagactctgccacaatttctgaggaacctctgtcttttttacactgttgctccatttctgtacaaactcccacagatgttttgtgatggtttcaaatattccttccctgcccatattctccatattttcatctttgttttatacatccatatgaaccctattcttatgtatctctggcatttatgacatctccacatagaagctctgtacttcaaacccagtacatccaaaaacagaagccatctcatctaaacaagtttctcatcctaacctcccctgttctttcagtctctagaaatcatggtatcagcaagaacattaagcatgttttctactctgtttttccctggttccccacagcttcttccttaatattacttgttagatccatttctactgttcatctgtgttgaggcaacactaaggcacatttccatcattttatgcctgagttactcaactttctagttgcatttgctgatgtcttattttctttttctgaatcttcttgaatgttactgccagatttgaccacttgaaatacgacatttatcttgtttttaccttaaaaagaaaaactaaacatctccctagtccctgtaatcagtaatctaaacatctctgcttgctttttaagctgactccaaaatttattaagctatttctgagcactttttataagtgaggttagaaatactaaggaataagatttttttgtgaacaggaagtattggtgctttaggttggcagagcccaaaatggatggataggaatagtaagggtaaatatcagagaaaccccttcatccaaaaatgttatgccaggtatacaatgcataaaatatatattctgtatccttaaagattttacagagtaatcaacattttatcacaaattgagaagccattttctacctcttatattggcaaaaattatgaagattgatcaaatccagtgagtatgcagggaaaggcacccatatttgctgagtgtacacacatccacaacccatcaatttccctagtaaagccaatgaaatactgacaggaatatacaagcatttgtgtataatgatgtactatggtgtaattttataacaatgaaaaattggagacaagtgaaatatttttcagtagggacaagtcaaattatgttatgtccatgcagtagaatgcaatgcagttgtagaaaaaataagatagcctagctgggtggcttacactgtcttcccagcaactcagaaggctgaggcaggagaattatttgagtcgaggagttggaaaccagccagagcaacatagcatgatcccatctctaaaatataataataatttaaatttttgttaaataaagaatgagataaaacttaatgtacagatataaaaagaggcccttaaagatatagacttaaggccaagtgtggtggctcacgcctataatctcagcacttttggaggccgaggcgggcagatcacttgaggtcaggagttcaagaccagcctggccaacatagcaaaaccccatttctactaaaaatacaaaaattagcagctgggcgcagtggcttaagcctgtaatcccagcactttgggaggccgaggcgggcggatcataaggtaaagagatcgagaccatcctggccaacatggtgaaatcccatctttactaaaaatacaaaaagtagctgggcatggtggcgcatgcttgtagtcccagctacttgggaggctgaggcaggagaatcatgtgaacccaggaggtggaggttgcagtgagcagagattgtgccactgcatgccagcttagcaacagagtgagactttgtctcaaaaaaaaaaaaaaaaaaaagccaggtgtggtggcgcatacctgtaatcctcgctactcaggaggctgaggcaggagaattgcttgaatctgggaggcggaggttgcagtgagtcaagatcgccccactccactccagcctgggtgacacagcaagaccccatcacaaaaaaaaaaaaaaaaaagatatagacttaaaacagatgtagatatgtataccatgatcttttttttttaacagatgtatatttaagaccatatatgtacaaatgcatacattcacatatacattttggtgggaaatgtatgaatggagacatttcagaatcctcagcgactggagggaattttatcccagttagggagatgctatcctttgttaaaagtcagtgcattcctacattattcagtgttttattttagtgtttaaaagtatttgagataacttttaaaatactttttttttggaaataaagaaaattttgtcagagaaatatgggcttgagatgatatgatgttagaatcctatcttacacccaggcatggtggcttacacctgtaatcctagcactttgggaggccgaggcaggtggattgcttgagctcagaagtttgagaccagcctgggcaacatggtgaaaccccatctctacaaaaaatacaaaaattagccaggtatggtggcatgtgcctgaagttctagctacttgggggactgagttgggaggattgcttgagcccagtaggttgaggctgcagtgagccgtgatcatgccactgcactccagtctgggtgacagagtgagagaccctgtcaaaaaaaaattctatcttccttgatattatcttctgatatttgctcttattgtcttattagtttatatcctcttgcagttcacatggatgagctcctcctaatttcttaaaaatcattttacttacttttttctttgaggcagaggcttgctctgttgcctaggctggagtgcagtggcgtgattacgggctgagatgtgaagtgatcctcccaactcagcctcctaagtagctgggactacaggcacacaccaccatgcctggtttttttgtttgtttgtttgtttgtttgtttgttttggttttgtagagacagggtccctttatgttgcccaggctggtctcgaactcctgggctcaagcaatcctcctgcctcagcctcctaaaatgctgggatgataggcatgagccaccgcacctggtccaccttacatacttctgacagcttcttttctctacttcttcacttgcatccatatcagctctctagacggcagaatcacatttgaggatgatccagaactcctgtacctagtatatatattttgtccttccattctcaccgtggcaattaattttttaaagtgcaaggaatatggatctttttttttattatttctttcagacttgaagagcaaaacaaaaaccaaagagtcagccttacagaatgatatttcgtgggaagaactacattgtggcctaatgatggaaagatttacaaaaggaagcagcatgtattccaccttgggaagaatctccaaatgtaataagctagaaagccaacaagagaaccaaagaatgggtaaggggcaaatccccctgatgtgcaagaaaacattcactcaggagagaggccaagagtctaatagatttgagaaaagaattaatgtgaagtcagaagttatgccaggaccaataggtcttccaagaaaaagagatcgtaaatatgacacacctggaaagagaagcagatacaacatagatttagttaatcattcaaggagttatacaaaaatgaaaacctttgagtgtaatatttgtgaaaaaatcttcaaacagcttattcaccttactgaacacatgagaattcataccggggagaaacctttcagatgtaaggaatgtggaaaagcctttagccaaagttcatctcttattccgcatcagagaattcatactggtgagaaaccctatgaatgtaaggagtgtgggaaaaccttcagacatccttcatcgcttactcaacatgttagaattcataccggggaaaagccctatgaatgtagggtatgtgagaaagccttcagccagagcattggactgatccagcatttgagaactcatgttagagagaaaccttttacatgcaaagactgtggaaaagcgtttttccagattagacaccttaggcaacatgagattattcatactggtgtgaaaccctatatttgtaatgtatgtagtaaaaccttcagccatagtacatacctaactcaacaccagagaactcatactggagaaagaccatataaatgtaaggaatgtgggaaagcctttagccagagaatacatctttctatccatcagagagtccatactggagtaaaaccttatgaatgcagtcattgtgggaaagcctttaggcatgattcatcctttgctaaacatcagagaattcatactggagaaaaaccttatgattgtaatgagtgtggaaaagccttcagctgtagttcatcccttattagacactgcaaaacacatttaagaaataccttcagcaatgttgtgtgaaatatactaaacatcaaagaatctatgttggagcacaagattctaaatcagtggttccctgatccctcaaaaatccatttgtttttggatttccaaaaacgaacattaaaaaaaaatggtttggcacaa

SEQ ID NO: 1086 - DNA, 12614 bp, Homo sapiens
gagatttcgccaacgcactccagcctgagcaacagagtgagaccctgtctcagaaaaacaaaaaaaaacccaaccccatgtgtgtggagggtggtgggtgagtcttcccttggatgcaaatgggggccctggcagcctccttggggctggtgtgaaggagacccccagcctcagaccctgggcacgccagcagcagcaactcagaataccacccggaagcaagccgctggccctgcagactctccaccttagaacagctgtgtctgtgacaaggacctcgctgtgtcccttactgccttgggggctaggagtggctggggtgtgtgctgaagggcccccacaaagcctccgcttcccctgcagtcctcctgcccctgctcgagtcttgcagtgtgcggcccgacgccagcgtttccagtcaccgcttctttggacccaaatgctgaaataaggtaaaaagtggctggtggtgcccatctgtgggtgcctgtgggttcggagcctgggagccattttcactcatcctgagaggccctgagggacctgcttccagcagcaggaggggctgtggtggcggcctcggggactgtcatttgacatgggacggctctggagccctcatctgtgtggaaaagtccaggtgggacagctgagcagcctccagcttaaaaacgaggctcatataaagagggtgccaggcgtggcggcacatgcctgtaatctcagctttttgggaggccggcttgtgcctgggaggtcaaaggtacagtgagctgtgtttgtgctgctgcactccagcctgggtgatggtgagaccccgtctcaaaaaacaaaataaacaaagagggagcaaacacaggagaaagtgcacgccttggggtcatcccctggccctccagggctcgccctgtgtgcacgcagatggacccgccctgggtgcattttcacatttctgtgacgtcagtcctgcttcctaaagaacataacctgcccaacaggctcacggcacatacctgtgtgccccagccccacgccctcaggccagcagcccaggggcctcctttcactccaggccacagggcactccctggaccccccgtctgcccatccatggggctctgccagcctcgaggcaggctgtggtctgaagaggggttctgctcagagcccttgctctcccccagccagccccctgccctgagccagctggtgaacctgtaccttgggaggtcacactttctctggaaagagcccgccaccatgagctggctggaggagaacgtccacgaggttctgcaagcagtggacgccggggacccagccgtggaagcctgtgagaaccggtgagctaggggttgacacaagccctgccacgccccctcctcagggaccctcatcccagacacgggggcctcgcattcgggaggcgagaagggctgtgagcagcttggcctcccttgctgtggggcctgtgtggagcctacaagacagcgcacagcccctggcgtgtcccagaggcttcctgggaggcagctgtggtgatcagcgcagggtaccgagctgctgttcccgggtgcctcgggctggagtggtgccttcgggtcttgcagtgtttccacatgagctgtgagatgatgacgagtctctcacagcagcatcttgggagtaaagaaatctggcagagacgagaaagagtctcctgtcctgtgtgtgaacacttcggaggctcatgccctaatatgctgcaactgacaggcatccccttgctgttcttgtctcgtttgtctgcgcccttggccctgtgctagttctgtgcatcagcaccgtggctctgtgcagtggtgtggccaggctcaggaccgcctgggagtggtgcccatttgcatctccacagtgaagtctgtgtgccgcggacatgaggtgtgcccgggggtgcccaagaggcgctggtgcccccagccgctggcagtcatgggcccgtccgcgtgtctgctgtccccactggactggacattctcatggacaggagcattttgttccctgtactgctctccaagagcgatttccagcagggaccagtgcctgtgcctgtagccgtagcagtgacgatggtgacacacccaggtgtcctttcatggagatgaactcagtgacttcccacaagaagccactggctacggctctcatcgttcttgttctttggatgaagaggctgagtcactggccatgtggctgggattggtccccagaggctccccagccgcaggccagggaccagccatggtgcctctgctcgagagtaaagtgtacagtttttgcagccaccagagatgcagcgagatgcctcgtgctgggtgggggtgggggccgaggctccatggcggttaccatttcatttgctgtgctttatctgctgtgccttgtttctccccggccctaggcggaaggtgctctaccagcgtgcacccaggaatatccaccgccatgtgatcctctctgagatcaaggaagccgtcgctgccctgcccccggtaagggagaaaggctgaaatgggagctctgtgtaagccggtcacatgcacgtcccttctgctccgggcggtccacatgcaggcgtgcgtggtgcgggctccctcagcagcccagccccgccacggcaggggcagggtctagtgcagagggctcctcctttcctggcagcccgggttcggatgcttgttgttttgagagagaaatcctttggggctcagagcacaagctgagtcgtcaccgtggtgagctgctccatccgtggtcttgtgagcgcgtggtgcggctgctgggggattctctgtagtcgtggggtgtagtcctgctctgacgcctcctgtgctggaggtgccgtttctgtctcaaaacctaaggagtttgtactgttgttaagggataagatagaacgagtgagaaaaccagcaagtcagagggtcgcaggaccgtggaccgtccactggggacagcttagtgcctcctggtttaacttcagctgctctgcgggcccttatgaccggcatggctggctttgtctggggctgtgagcttctgactctcctcagtagagtggcagcacgtggcactgtgcaacccgagggcagctcagggtccctgtagcctgcatttgctgaagtgggagcttctgacacgtggtgaagatgttggcaggcttgagcggcacgtgacccccttccttccccaccacacactctggtgtgcagggcagacgccgtgcaggttcatctcgactcccgtgagtgtcctggtggcagaaggactgtcccaccctcacccaaagctcgttggtacaaaaagcacagccgtttctgtcagactctgtggctatctctcagcagatgcatccagtccatgctggagtcgacagaaggactctgctgggagaggtagaggccccctggcagcatctgtagcatcttcgttttatgtccctttctgaaggacgtgaccacgcagtctgtgatggggtttgatcctctgcctccttcggacacaatctactcctacgtcaggccagagaggtacctccctccttccagttcccacctcccagctcccacctccctcctcccagctcccggctcccacctcccagttcccacctcccagctcccacctccctcctcccacctcccagcttcctgctcccagctcccatcttccagctgccagctcccagcttccacctcccagctcccacctcccagctcccacctcccagctcccacctcccagctgccaccttccagctcccacctcccacctcccacctcccagctcccagctcccacctcccagctcccacctcccagctcccacctcccacctcccagctcccacctcccagctcccacctcccacctcccacctcccagctcccaactcccacctcccagttccaacttccaacacctccctcctcccagctcccacctccctcctcccagctcccacctccctcctcccacctcccagttcccgcctcccaccgcgcacctcccacctccctcctcccagctcccagctcccagctcccacctcccagctccaaccttccagctcccagctcccacctagcagctcccggctcccggctcccacctccctcctcccacctcccacctcccagctcccacctcccacctcccagctcccacctcccagctcccagctcccacctcccatctcccagctcccagctgccagctcccagctcccggctcccagctcccagcccctcacaggaagggagaggaggagaggaacagtgttatttgggggtcacagctctgcgtttgcaggccacgttctttcccatctccaccgaatgtacaagcgcttgcgtgtcggcctctgtggcaggtgggagtgacacagtggaagcaggtgtgcagtgaagtggggaagacatgttaattttgggatgtaggaataaacataaaatcaggagtgcaccagcctggccaacatggcaaaccccgtctcaactaaaaatacgagacttagccagctgggtgcagtgactcacgcgtgtaattccggcagtttgagaggccaaggtgggcaaatcacaaggtcaagagattgagaccagcctggccaacgtgctgaaaacccgtctctactaaaatacaaaaaaattagctgggcgtggtgccgcacacctgtagtcccagctacttgggaggctgaggcaggaaaattgtttgaacccgggaggcacaggttgcagtgagtggagatcgtgccactgcactccatcctggcgacagaggaagactccgtctcaaaaaaaaaaaaaaaaaaaaaaattgggcgtggtgggttgtgcctgtagtcccagctactcaggaggctgaggcaggagaatcccttgaacccggaaggagggggttgccgtgagctgagatcacgccactgcactccagcctgggtgacagagtgactccatctcaaaaaaaaaaaaaaaaaaaatcctccagtaaggtgtttggaggaaggatggtggctgtgctgagacggagaggatgaatgtgccctcaccaggctcaggggagagggtccttgtgttccccagcagagtcacgatgtgccgaggccctgtgccaggagcagagcacacggcacattgagagaacaaaagccccatggccagaccgggagagcagggctgcggcgcaagagggccaactgccaggcggccggtgtgtctggctttcagaatccgggtcattgaaaggctttttaccttttccttctgggctggaaagtacttgccttacccaggccccgtcacccgcacagcggtcgtcgtgattatccctgccggcagggtgttgcagcattgaggaatcgcggttctttgctgcctccctccgctgtggagcccaggctttcgccctccctagagctcctgaggcctggccgctcagcgtcctgtagagccgggccggtagcccttcgcaccgtgagggtctccgcttaacgcaggccctggaagcttctgcctttgcgtaaggagtgggtgctgaaggagacgttgaaactgcagcttttctgaaaagcaaggcacctgtgcagtggccgaggatggctgtgggagcctcgctccggacgccacgcctgcctcagctgagttggtctccctcatcctgttcccgctgtccacagccccaccctaagctgatgaggaagcctcacgggccacccggggaatccagggcctgtgctcagctgctgctgctctgccccctggcggcccctccgtgtccctgcgagggaggcagctggcaggcagccccgtgagccgggttgggtcccacgagtctcagttcagtgtcgtttctgacttttcttgactttctttcaggctaagtcctatcagccatggaaacaccattgctctcttcttccggtcactgttgccaaactataccatggaggtaggttgagctcgtcccagcccctgcctccccagtgggtgcgggcatatccattccagtgcgaatgcctggagcctccttgaaccaggactgtgccagccggcacagggagcagggaaggaccaaggctgcattgtgccagtggggtgcccattctgccggggaaactggggcctgcccagatggtagcagatgcagggccgtgagtcagccggcttgatcccactctgtgcctggcttggtctagacacggcatttggttttgagagcttcctcctcacagggacctggggagggttcagggtccggtgctggggcaagggccacctcgggctccacagtgcctcctgcttgggccccgggcccctagtcccagcacagacagcccccttctcagacatgtccccttgctgcagggggagaggcccgaggaaggagtggctgggggtctgaaccgcaaccatggcctgaacaggctgatgctggctgtgcgcgacatgatggccaacttccacctcaacgacctggaggcgccgcacgaggacgacgctgagggggagggggagtgggactgagcgtccgcagaggtgaccgaaaagccgtatgatgatgttcccgatttctctgttggtcggagtcggccagttgcctgaagtagggaagctgagtgtgtcgctccctggtccactgtttctcctataaatgtaaatgggtcacgctctgccgtccgcaccttctcctttcgcaggcactgagcgccgtcccatgccctcggattcgaatcacactcagtccattctcctcccagtggcttgtgggtgaggtggggcccagaccccatgcttcctgtgctcccaggatctgggcacgggtggagaaggggccccacggggtcttcagtgcaggtccctgctgaatgccaaggccctgggtgcacgtcctccttgaacttgctgtggagttcgtcaacagagctgcgtgccttgttggtagagggtctcagggcagggctggagcagagaggcccctatgtggcagccggccttcagtcttgttcctccaagcaagtggggtggagatgttggggtcctttggctggatgccactatctgttgaatctgacaaaataattttcttttttttttttgagacaagagtctcactgtgtcgcgcaggctggagtgcagtggcgcagtctcggctcactgcaagctccgcctcccgggttcacgccattctcctgcctcagcctcccgagtagctggggctacaggcacccgccaccacgcctggctaatgtttgtatttttagtagagacggggttccaccatgttggccaggatggtctcaatctcttgacctcatgatccgcccgccttggccccccacagtgctggggttacagctgtgagccaccgcgcctggctctgccaaaataattttattagagaacttgagggcagtgcccagaattgaaggcgaagccccagaagcatgttttgcagagaagtgcccagggaagctctgagggcccatgtagcaaagatcaggggatagtcggtctgagggtgaatgggccactcggaccaagaccccagtcttgggggagggcttagctggagcaggtcctggcacagttgactgatggtgcacagaacccgtgcatcccacggccccacggtgctgcagctgcaggaggggcggaggctgcagccagacagcatcagaagccagcgtggttctggaaggatcgagaacaccaaggtgttagggctgcagcaggggtcctgtcccctggcacccctcaccgccctaatcttttacccttaggaggcagcagacacgaggggctgcccgaggctctagggcggccagtgaggcaggaaacatgttccagccccagctaggtactggtccgtggacccacctcccagaaagcccatcactgtgtaatcgtctaacctggggctcgccgaggcctgtgagttcatccttttggcagttcctggtgtctccttactctgctcagcatttcctgggcgggagcttagggtgcaggaccctccccaggacgacgagggcccagtgtccatgacaagagttggcccgagggctgagccacgtgtgcccatctcagacgtgggcctgagggtgcagccctggccctgtgctggccatttctaggagcggtgccctgaggtcccagctgtgatagccccacgctctgcaggaagagatcatgggggcggggagttggtgctgcggcctcgttcctctctgcagtgagtgaacgatgtttgtggtcagcaggagcctgtggggagcacaggctggtcctcctggtgtcccacccacccctttttccatgggggatctgcactcatctccagggaagatggttgggagataaccccagtctgctctaggtccccaccctccacagccagggtggtccgtggtgagcttcagccatcgagatgcgggagtctgctagagtcttcagggtcttttctctgaaaatgacaggctagcaaggagacctgggtcccctgcctcttccattccagatgccttgagtccacccaaataggggatgtgatgtttggagctgcagcagccgccctacggttgggagtcagagaagagccggtgttccagggacaatgcagcagaggctgagcccaggcctgctgtcctgagaggtggctggatcactgacactttggcagtggtgctggggtttatgtcatgacctgcagctgagcctacttccaatgaccgtgagatctgaaagactgttttgagggcgtagcctctgccatgattgtggggaatgctgtcctgtttcctcccttggccctgctcagcccagcgagaggctgaggcgcacgtggctccccgggtgcccacaggcagcgtggctcaccagccgggcccttttccactgagccagaaccccccaaagccttcaatgcaggcaccacggtgagcccacgagaaaccctgcttgccacctcccacacccccacccccaagttcaaaggaaatggtccctgaaccaagggctgagatcagctgtgggtccagctgtcctggggagctgtactggagcccaccacggtgggactgttggtccggcggtgacccccacctccatgtctgtggccgcagctggacaggccactccctgggccacagagatgttttacctctcgcagccctcgggcacacattgagcaaatgtgtgtgtgtgtgcgtgtgtgggtgggtgcgcatttgtgtgtgcctgtgtgtgtgcgcatgtggtgtgggtgcacgtgtgtgcacgtgtgtgggtaaacattgtgtgtgcgcatacgtgtgtgggtaaacatttgtatgtgcacgcgtgtgtgggtaaacgtgtgtgcgcacgtatgtatgtgtgtacatttgtatgtgtgtacatttgtatgcatgtgtgcctgtgtgtgtgtgcctgtgtgtgtgggtgcacatatgtgtgtgtgtgtgtgccagtgtgtgtgtgtgcacgtatgtatgtgtgcacacttgtatgcatgtgtgcctgtgtgtgtgggtgcacatatgtgtgtgtgtgcctgtgtgtgtgggtgcacatttgtgtgtgtgggtgcacatttgtgtgtgtgtgcgcctgtgtgggtgcacatttgtgtgtgtgtgtgcctgtgtgtgtgcctgtgtgtgtgggtgcctgtgtgtgtggggcacatttgtgtgtgtgtgtgcctgtgtgtgggtgcacatttgtgtgtgtgcctctgtgtgtgtgcctgtgtgtgggggtgcacatttgtgtgtgcgcctgtgtgtgggggtgcacatttgtgtgtgcgcctgtgtgtgtgggtgcacatttgtgtgtgtgtgcgcctgtgtgtgtgggtgcctgtgtgtgtgtggggcacatttgtgtgtgtgtgtgtgcctgtgtgtgggtgcacatttgtgtgtgtgcctgtgtgtgtgtgcctgtgtgtgggggtgcacatttgtgtgtgtgtgtgcctgtgtgtgggggtgcacatttgtgtgtgtgtgtgcctgtgtgtgtgggtgcacatttgtgtgtgtgtgtgcctgtgtgtgtgggtgcacatttgtgtgtgtgtgcctgtgtgtgtgggtgcacatttgtgtgtgtgtgtgcctgtgtgtgtgggtgcacatttgtgtgtgtgcctgtgtgtgggtgcacatttgtgtgtgtgtgcctgtgtgtgtgtgcctgtgtgtgtgggtgcacatttgtgtgtgtgtgtgcctgtgtgtgtgggtgcacatttgtgtgtgtgtgtgtgcctgtgtgtgtgttgcaggccctggatgccagacactgtataaacgcaggaagacgtgtgtcttcattctcctcgtgggtcgctggtccagaaacacctggatggaaagtgctctgcaggaacggtgcctctgcctgtggcggggaccctggtgagcggatgggccagccccacgtgtcttccggccactcagcatgcagtgtttccaggggcactaagagaccaaaatcgagatatgattagctgtaggatgtcatctaatcacagatcatcccgaggctaatttatctcccccatgaccataacacatcaaaaagttgactttttgcagctcggctgtgcctcatcttcccacgaagccccgacaggcacatccagtgaggaaccacagtgggagtcctgtggcagggtcaccccacttccgatgccctccagctgcatcttggcacgaaaaaggctgcccagttctcatgccctttcaagtcccgggctggggggtagcagtggaggctggggttaaccgccgtccgtctcaaaggcctcattgtggagctgcaaacacgaacgtccttgaaatgtgaggggacagtgctctggggcaggggctgctcactggttcatggccagaggtgagcgggctctgggtctgggtctgtgaggtgctgtggacgtcgggggtgctcctggggcagggacacagccacggccctcacaccagtggagccgtcttccttcccgaggcagaggcttggccttctcacaccttgggacccttctctcccctgtgctcatgctggaagcacagcgtgagggggcaaaggtcatgggaggcaaaaggctgggctgaggccgaggctctgtggctgtggccggataccaggtcctgtggtggtgtgggcagggcgcgctctctcttctgagcagcctggggctgcgtgtgtgaacagaaacaggcctgccgatttgaagatggtttgaccaagtctcccaaagctgaagagaggtccctgcccatgtcccccgggtggcaatccacagacgcacctgtgtccatcagacggtatcgttgatagggagtctgaagccacccagacgtggtctgttcacgccgtggacaccacggtctgaggcagacggttacagccaccggcataggcgaatctcagccagagagagtgaactgggacaccattcacgtgatgggccagatgggctggcagcggctcgctggagccgtccgggtgggaacgctgtgtctgttggtctggtgctgcttatgtggctggttcaggtctgtcatccgtcaacctgcatatttatcactggtgcattttcatgtatgttgtacctcaattaaaacattttagggccgggcgcggtggctcacgcctgtaatcccagcactgtgggaggcggaggcgggaggatcatgaggtcaggagatcaagaccgtcctggccaacatggtgaaaccccatctctactaaaaaaaatacaaaaatttgccgggtgtggcggcacgcgcctgtagttccagctactcaggaggctgaggtatgagaattacttgaacccagtaggcagaggctaccgtgagccaagatcatgccactgcatttttttttttgagactgtatctctgtttcccaggctggagtgcagtggtgtgatctcggctcactgcaacctccgcctcctgggttcaagcaattctgcctcagcctcccaagtagctgggattataggcgtgcgccaccacgcctggctgatttttgtatttttagtagagatggagtttccccatattacccaagctggtcttgaactcttgccttcatgatccgcctgcctcagcctcccaaagtgctgagattataggggtgagccactgtgcccggcaataataattttttttttttttgagacagagttttgctcttgttgcccaggctggagtgcaatggtgcaatctcggctcacggcaacctccgcctctcatgttcaagctattatcctgactcagctgggattacaggcacccaccaccacacctggctgattttggtatttttagtagagacggggtttctccatgtcggccaggctggtctcgaactcctgacctcaggtgatccacccgccttgggctcccaaagtgctgggattacagccctgagccaccatggctgacaataataaaaaattttaaagcaaaactaaagatttataaattgtaaaatgcggttgtaacaagtatttactgtaccagtaaatatgaaaaatattaatgtcctcaca

SEQ ID NO: 1087 - DNA, 2343 bp, Homo sapiens
agagggcagtttccggggaagtttcggaattcctaggggggcggccaggtgggggcccttgtgacccaggacagactgtggtttttttttaacgtaaaggagattccgcggtgtgagggaccccctgggtcctgcacgccgcctggtggcaggccgggccatggtgggtgctcacgcccccggcatgtggccgccctcagtgggaggggctctgagaacgactttttaaaacgcagagaaaagctccattcttcccaggacctcagcgcagccctggcccaggaaggcaggagacagaggccaggacggtccagaggtgtcgaaatgtcctggggacctgagcagcagccaccagggaagaggcagggagggagctgaggaccaggcttggttgtgagaatccctgagcccaggcggtagatgccaggaggtgtctggactggctgggccatgcctgggctgacctgtccagccagggagagggtgtgagggcagatctgggggtgcccagatggaaggaggcaggcatgggggacacccaaggccccctggcagcaccatgaactaagcaggacacctggaggggaagaactgtggggacctggaggcctccaacgactccttcctgcttcctggacaggactatggctgtgcagggatcccagagaagacttctgggctccctcaactccacccccacagccatcccccagctggggctggctgccaaccagacaggagcccggtgcctggaggtgtccatctctgacgggctcttcctcagcctggggctggtgagcttggtggagaacgcgctggtgttggccaccatcgccaagaaccggaacctgcactcacccatgtactgcttcatctgctgcctggccttgtcggacctgctggtgagcgggagcaacgtgctggagacggccgtcatcctcctgctggaggccggtgcactggtggcccgggctgcggtgctgcagcagctggacaatgtcattgacgtgatcacctgcagctccatgctgtccagcctctgcttcctgggcgccatcgccgtggaccgctacatctccatcttctacgcactgcgctaccacagcatcgtgaccctgccgcgggcgcggcgagccgttgcggccatctgggtggccagtgtcgtcttcagcacgctcttcatcgcctactacgaccacgtggccgtcctgctgtgcctcgtggtcttcttcctggctatgctggtgctcatggccgtgctgtacgtccacatgctggcccgggcctgccagcacgcccagggcatcgcccggctccacaagaggcagcgcccggtccaccagggctttggccttaaaggcgctgtcaccctcaccatcctgctgggcattttcttcctctgctggggccccttcttcctgcatctcacactcatcgtcctctgccccgagcaccccacgtgcggctgcatcttcaagaacttcaacctctttctcgccctcatcatctgcaatgccatcatcgaccccctcatctacgccttccacagccaggagctccgcaggacgctcaaggaggtgctgacatgctcctggtgagcgcggtgcacgcggctttaagtgtgctgggcagagggaggtggtgatattgtgtggtctggttcctgtgtgaccctgggcagttccttacctccctggtccccgtttgtcaaagaggatggactaaatgatctctgaaagtgttgaagcgcggacccttctgggtccagggaggggtccctgcaaaactccaggcaggacttctcaccagcagtcgtggggaacggaggaggacatggggaggttgtggggcctcaggctccgggcaccaggggccaacctcaggctcctaaagagacattttccgcccactcctgggacactccgtctgctccaatgactgagcagcatccaccccgccccatctttgctgccagctctcatgaccgtgcgctcgtcagctgggatgtgaattctctgggtggaagtgtgtgcccagagctactcccacatcagtcccaggagaaggggctttgtgaccagaaagcttcatccacatccttgtctcggctcctggcacaggtggtgatatccctgcctcaggccaatggaccaggtttgcaggagcccccctagtggtatggggctgagccctcctgagggccggttctaaggctcagactgggcactggggcctcagcctgctttcctgcagcagtcgcccaagcagacagccctggcaaatgcctgactcagtgaccagtgcctgtgagcatggggccaggaaagtctggtaataaatgtg

SEQ ID NO: 1088 - DNA, 1002 bp, Homo sapiens
cacgaggtcaggagatcgagaccatcctgactaacacggtgaaaccacgtctctactaaaaatacaaaaaattagccgggcgtgttggcgggcacctgtagtcccagctacttgggaggctgaggcaggagaatggcatgaacccaggaggcagagcttgcagtgagccgagatcgcgccactgcactccagcctgggcaacatagtgagactccgtctcaaaaaaaaagaaaaaaaaaaaaaagacgggcctcctccgaggggctgtgaggggtgagggtgaaatccctccttaagacgggcctcctccgaggggctgtgaggggtgagggtgaaatccctccttaagatgggcctcctccgaggggctgtgaggggtgagggtgaaatccctccttaagacgggcctccggccgggcgcggtggctcacgcctgtaatcctagcactttgggaggccgaggtgggcggatcacgaggtcaggagatcgagaccatcctgactaacacggtgaaaccacgtctctactaaaaatacaaaaaattagccgggcgtgttggcgggcacctgtagtcccagctacttgggaggctgaggcaggagaatggcatgaacccaggaggcagagcttgcagtgagccgagatcgcgccactgcactccagcctgggcaacatagcgagactccgtctcaaaaaaaaagaaaaaaaaaaaaagacgggcctcctccgaggggctgtgaggggtgagggtgaaatccctccttaagacgggcctcctccgaggggcggtgaggggtgagggttatttgcgtgcagctagtatacacacattacgtgaccactcatcgcctattaggatgtcctggaagcagcatccctttctcggttctgtgggtttccagggctctgtctgggccccgaggaggcccacggcgtggggttgggcagcttctagcacaggcagaaacgtgccccccagaggggcctggccaggcctcagt

SEQ ID NO: 1089 - DNA, 3029 bp, Homo sapiens
tggagacaagatattgtaaggaatgaacaaggttgccacagtgcatggacccaattgtgtttgcctgttgacgtgccatcagtgcgtgatgtggtatgacatacacacaccagagcaaccgccacaccagatatcgacagagtggtcttctctgcctgagaccacctctcactacatccattatccctttgcctttaaccctgacattcagtcttaacacattttatcttaaataatttattcattccagaatgtcaagggtccacttgctatttattttttttcaattgttggtggcattaatttaataattcttgtttttcaccttccttccccgaagaacttttccgtccttttcacctccttctcctgtgtacatagtgattttatgtccccagaacgcctggaagcatttctgaaaccaagatattattaaaaacctattattgtttttaatcatgagtatgtatctggctgcagggctgtgtattgggatataggtatatagtcttacacttaaacaggtatgcccctgaggttcactgtgacctcaagtcttttgccagaattttcccctaattcagttcacaagtggtagggtctgcatcagtggcatttccccctgaattccattcagcagcaaggttcaacagtggtgactgccacgcaggagagtcctgcggccaaacctgaagcccaaggctcgtgggccatgcaggaatctcagtgaagctgtcatgggctggcacctttacactgagttgccttgtcccagctggcacatctagggagttcattgcaaaatccccaggatgcaaaaagccacatgacagcctcagagcaaagatggtggcaaatagtcatgatacatctagagaatgaaagagaactgtaagggaggagaaggaggggaatacattccctatatgggatgttcctactgttaactctggggaacagatagctcctggggcagcagatgagttcctctggctgactctatctgtagccacatggggacctgcctacgtgtgaacaaaatgaactgcacttatcacacaagggtgttgtttgaagacatgctactggggtgggaagcagtgaggttttattccccatctcctaactacagggagctctgccatgtcattttggccttcctgaaactaggacaggttgtctatcggggggcttcccccagagaggtttagtgggagaatgtcagtgaatgggatagttcacctcatgggacaacccagagtctgatcaccaggacataggaatggccccatcagatttcttgagccattttgtcacttggaagaaaatagtgtacctttgtatttatttaagagtgctcaaggcctaatagcaataaacaggtctagccaagaaattacaagctattctgttagctgggagtgctctctataagctgattaaggtactgataggaactctttgttattcatgttggttggggattagaaatttgtttttgtacatttatttcaaatgaggaggaggtcattttttctctcaaaaaatgagtatttattattgtcttactgatttctttgattatatacctctcctcctcagttcactcttgttttttttctttctctttggcttttgcttttgctctctctcacttctttcttattttgttgcattggtagagtgttgtatggctagcattgtattgtatgtaattaattttgcacaaaagcaaacatttagcatagtaggttaattttgtttgtttttatgaccatgccaaaataatattctgggctggtggagaacaaaggactgttctttaggactgaaacttgattttgctcatagtaagtaaaaaaaaacaaaaaacacacacactcacagatgttgtttcgtaagtgttataagcactggatataaatggtattttttatcacttctgactaatgtgaaactgttgtacgaaaactacatgaacaaaagtcatctgtttcgactcgtgtgggcttgcctcacagttgccggatttgagtcatttttatgtcttgttatttcatttatttatgcaaaatacatgtgtgtatgaacactttgttttagctccagctctgcctcagtactggggttcatttacttttagccatgttcttaaaaatgaaaggctattcaggaatgatctgattgtaaacgtctttttcattggatcaaacagtaatgctgtatttgaatctaaattttgtgtataagcagtttatttattagccaagtttggctctaaatatccatggaaattaagaatgacaatcatagggatcaattcattttattttcagtggggcttaaacaaagtttatatgactttaccatctcattttagatttttctaattgtgtaaatataacatagaaatagaatttatttttggttcatgaatacttagtgagatataagttatgtatttcctttttgttctctatccatagatgttggtccaaactgaaagttgatgagtcactgtgcctctcggggtagtgagttatcagctacagtgagagagcagtgtttggcctgcagctgggacagcaaaacgtttcaccagggttctcatgcagttcagaacccactgtccacagatccagacatttcccttttttcttacagaaagttgatgattggacatactaaatttccactacagttaggagacagtcagtttgctttgggagtctacataaatcttctaagatagttctgtgaccatttaatagcaagaagcatgaatgccactacaaaggcaaaaatccacctctgagatcggccgttaataaacgtcccgtcatgtcagtttagattcaagaatgttaagcaactttgtttttgcggtgctccctatttcatagtatcttcaaatcaaaaataaaaattatctccattttgttaaagaacttacagggtcagggttctccttgtcacttagaattgggacactgccaggcaatcctctcccaaaaaaaaaaaaaaaaaaa

SEQ ID NO: 1090 - DNA, 507 bp, Homo sapiens
atggcaactaccacaccatcgcctcagatgacatctgactgctctagcacctcggccagcccggagcccagcctcccggtcatccagagcacttatggtatgaagacagatggcggaagcctagctggaaatgaaatgatcaatggagaggatgaaatggaaatgtatgatgactatgaagatgaccccaaatcagactatagcagtgaaaatgaagccccggaggctgtcagtgccaactgaggagtttttgtttgctgaattaaagtactctgacatttcacccccctccccaacaaagagttattaaagagcccgcatgcatttgtggctccacaattacatcagcagaatggtcttaattgtttcgtaaagtgtgagacagattaagttttccctgatttttcatgaacttgagttttttgttgttattgttattgttgttgttgttgtttttttaatttaggtgaagacatattaaatatgagacaccaggacttgaaactt

SEQ ID NO: 1091 - DNA, 2222 bp, Homo sapiens
gcgtgatcactatagggctgaaattaaaggctgctttcttttccttctgaagccaggctgcttcttcggagtacaccctcctgagccaggagcacaagcactagcagaaagcagggattgtttcaggaaagcccatttaccctcagtaggaaggcagcctggtcacttgaacagcacagctgaggctgcttctctcaatttactcattttgcaaagaattgacctctaccaactcattagggagaggaaaaagaatcacttagtaattttaaatcatatgagaagtcctgtaccaagtgccaacaactgcaaagaaatgcagctagaggaatgtattgaaattactactgggtcttcctttttaatgagaaaatgacaaaaatggttgctgtagccctgcctgattttgtacacgtttgtctaagaattgagttggcacttaagctcacttctcaaagtataataatattgtatgacctcatttgtcctttcacaaaagcacttgcatcatttccttaagtcatctgctccctgacatgttttcttccctaataaacaacttctgtctgttattcctgccaatgatgttctgtttctgatgccatatcctattgagcgtgcccctgtactaatatcattgaaaatattgatatgcaaacacatttccttttcatccccattctatctttccctttggggacagattgctttccaaaagctcatgaacaaatatttggaatgctggtacctttggggcagaggtaagggtgggcggggtgggggcagaaaggtaatgcttaatgcagataactcttctaatcagtgtccatggcaatatgaacgcttgaagaaaactcagtgacatatcttgctcagtagtttcttattcctgaagaaccacaagcataaagtgaggcctcagtgctggtgctcttggagtatggggaatgtgcaaatatttaactgttttgtatgctgcacattgcaggtctgctcatgtgcattctccctttgtcttcctttgtcatatgtgtttttgcttttttgaaagtgcagtctttattgtaccctcctccagcttgtagcaaattagaatgcttagcatttatgttcattcattattgtatttgccatgtaaaatttttattaccttagacaagcttataagctgttactacataacttatcttactgtaactcttttatttcccccgacgttgtaatttgtttgtgatgtatattgtgaaattgtattctatgttaatttaatcagcacaattcactgacatgctggactgacatgctggctgctgtttcaaagtgtaaagtttgtgtagggctgttgggacaactgcaactctgttgtcaaggtactgtgctttggttcctatagcaacactgggtgtggcccttgaattgctaagggcatttaatacatcctggagcaaattttaactgcagattttctttgtagaaattctatgtataatgcaggtacctacttggcccatggctggtaactatttgggcaattagaaaaaaagaaaaaaacataaaaactagtgtctattgctgctttgaatatgtttgaaagtctgaaaatgtaaatagtttatcaaaaaaaaatcttgtacagtccagtgtaaagtttttaaatgaccttaagggttgccatcacatctttctcacactctcctcttgataataataataataaaaagtttgctaaggattaaagaaatgggaaaaataaaaaaaatctcttcaaatttacaggaatgaatcattgttcttagctttgttgcatacacaaacttcttggattttgttgtgcagtattgacgtgagataaagctcaacattgaataatctttcagtggtacttttcaaagtcttcccctcctctgcctcataattaagggaaaagacaaaattgaaagacacactgtctttatctatcctggtgtatgttggcaccttagctactttttttttttcctttttgcacaaggtgctttcctgatatgttcaacatgccatctttgggtgataatgtatatgccgtgatggggctcaggccccttaggggagtgtctataagaactgcctatttatgctcatttacctcaagactgtcctctctaccctaatctagttgtcatcactccatcttttgtactgctgttgacacttacaaattaaagataaattttgttttatga

SEQ ID NO: 1092 - DNA, 373 bp, Homo sapiens
gttttgttttgttttttgttttcagagcctaacctgcctggaggaaggaaattacccacctctggccatcctgtccccaagtaagggtggtgatgggagggagggctgagaagctcttgtgaaggtcacagcccagaggctaaggctccctaaaggactcagacctaatcacagggctatagaacctttccccttcccacacatgttacttatagtactgcaggcctctttacagcagttacagttacttttacctggtacatcacatctggttatcaagaaaaaatttcagctggacctataatcctattactttttgagaagctgaggagggaagatagcctgagaccagttttaagaccagtctgggcaa

SEQ ID NO: 1093 - DNA, 373 bp, Homo sapiens; identical to SEQ ID NO: 1092

SEQ ID NO: 1094 - DNA, 116 bp, Homo sapiens
ctcacgcctgtaatcccagcactgtgggaggctgaggcaggtggatcacgaggtcaggagatcgagaccatcctggctaacacggtgaaaccctgtctctactaaaaatacaaaaa

SEQ ID NO: 1095 - DNA, 546 bp, Homo sapiens
aaaagtagtaaaactttacaggggacgttcagaagattcagagccacctgcacagcaatgtgctgaagataaagaaacacaggcgttctgccataagataccaattacctccaaaatcccctgactcaaacaatgaaagcaaagtgagaaatcccataaaaatggtcttggtggatatcaaaagactcaaccaaagtcacaaccaggaaggaccttggttgtcatcattttaagatgaggaaaccaaggctcagaaaagttggttagggaagtatctactgacaaaatctagctaatgataggggaatcactaaactctggtctcttttctgccctagaaaatgtcaccttctctttagatgccccattgcgctatagccagtaataaattctctagttgtacaaatcaagcaataatgattataaaatgtgcaatttcaaactactctaatagcttgaaatgtatatatggtaataaccttcaaaaagcagttgcttcagagcttggaagtcagcactctgtcttaagaacaagtaaaaagccag

SEQ ID NO: 1096 - DNA, 3803 bp, Homo sapiens
atttttcaggcataaataaatttactaagaagcttcgaaatccctattccatcgacaataatgagctactagacttcctctctagggtaccgtctgatgttcaaaaggtatgtaatgaatggttaccaccaacagtggccccaacctgaaatctggccagccccggagccagaggaacacaaggctttgcttgtgtgagtaattgagataaggaaccagaaaatccttaaagaggcctggcttgcagagaagtggcagaaaaatctttgtccaaagcatgaggtgattgggggaaattgttttgaaaaagagctacttaagtatgatctggaactcacactgtgtggctactgggcactgatgcttgtcccctttcgattgcttgcctccctaaagaggataagatgggctcagtgagtagaattgcatgagatccaaacccagggagtgttgcttattttcttcttccgggtggcaagcattttaggggaagtaggggacaaaaggattattctttttattctcatttgccctgatttatctcctaggcctcccttctatcgtcttccctctgaagacttagggatgctgagaatgcagcccccatttactgtaatacacaaagaggcagaggcagtgtgaaataatgtgagatcaatcagaagtattattcacagataatggtcacctagtccagcagtgtcctgtttctgtggatacacagagattaacgaaggcaacaatactagaaagtcgtgtagagtagctcgatcctggcccctgtggatcagcctgctataaatccagaggaaggagggcaggcggcagtttctctaatggagaacagagatcactgaataggtagatggggagaccatggcgtgaaatatcatcaagatgatcaaagacacaatcctttaatatctcagagaatcccaaatcaaatatcgattttcatatttgagccactgtagcataattggttccctggcagctcagggaggatttcaaagatctggggcggaaaagccttagagtttctttccccttcattccgagttctagaaattaaaatggactctgtgatgctatcttcctttaaaattcatttcataattagctgtgaaaacacattctagaaagatgaatttactctttaacatttgtattacttaattaaaaaataataacccggcccctgtttgttttgcattgaagattgacaggtatgtcatcctctgctcccttagggcaccttcgcaaaacaccataaggaatggggtgttttcttcatttatctgcctctgacaaagtacagcctgacttctgtgatcaggcataatgtccttggggaatttgtcacaaatgctaaaaatagggagcacatgtggtctgtaatacaatgttttaaataaagccattccaccagcagcctatcaaagcccacacaccaaagcaatatatttgcaacgtaccatcacttgggtcgcagtgtgagttcacactgtatccttgaagaacagaaatttccctcaagcccccaaggattctctgtgcagagtccagtcactagccctcaaagtggccattccagttggagatggcatgaacacagagagatgcagcaaaagaacattccaggaagatgtacagtatgctagtaagatcctccgtgtatcgccaagggcgctttctaataacacagtgacagtttgccactggggactcccaagtactcatatttatcacagatgttttagtcattacattgcaaatgaaattaatttccacgagaaatctatataaaagtctggggtccagtatcaatttcagcattttttcctctcaggcaaagtaaatgtgtataattttccgagatgttttccccaagattttagatatttttaaacgaataatcctcagtaagttgctgtatcatatactaagataaacattcccaagaggcagttattaagcttacttatggttgaaaactggcacacacaaaacgaacatcatctagcagtgcccagcgaaggtagaaacccacgcatctcattagaaaaatctgcttttaatattttggtttcaagaaatgatgcatgacttctcaaatccttcctgcaattaatccctccatgttcctgtgtttagaaaatgattcattacctttgaaccttccttcctttgccttcggttgtccttggggagccattagcacacactgtggcgagctagggttacctaaccgccagcatcacggctatttgttttcacaggtgcagtatgcagaattgaaactctgcagcagccacagccccctgcggaagaagcgcagcgctctctagggcacacaccgactttggacagcagcacccaatattgtgtttggttgagtagaccaatgttatggctgtttcagtggtacccaaggtgtccttctgaaatgcatgccctgtggcaccctctgtatacttcctcctccttcacgtgcacagacatacacacatgtgcacacaccctcatgcatgggtgtcctagttgcgtagagggtcagcccagcgaaaagcaacaaccccaagactgtgaaagactaacatccattctgaaataggagataacaaggctgccatggatctgaacaccaccttccttgagaacagccaggagcccacttggattcaagagtgactttgaacttgttttcacacctccaacagactctcattaagattcagttatttccgctccccagccccacactcctttcagattatcgttcatgggcgtaagtctcttctcagagttaacaagtctttggtagtcatcctctgtccaaatattgtatattattaaaaggcatttttaataattaccagaattagctcaaacctttagggatctttcagccatgattattaaggatatgtatgtgaatttttgggaaacctctcggtgctggatgccagcctacagcagggtccattgctggcaatggatggcccaggaaggtccctagagatcactcacttgaaaaatgagggtcccatgaaagtatttggttgccttctgatgccacttcttctcactttactttttgcttattttcaaaatattataaaatgtcaacatataatttcagaaaggcaggtgggggtaggggagaaatgaatgaataaattctctaggtatttagaaagataagaaactgaagaccgagagactaataaggctgcttacctaattattataatcatttcatttgcctgaatgttttaagcaggaagtagaaatactttggctgcccaaatgtatcttttgttcctcttagaagtaaaataagctacatacaataaaaatttatttcagaaccccatttctagaaaataccaccccagagtcctcatttgatagcatctgtctcctgcagacctcatcattccacagtatttccctgccatgtaaaaatcctgactttgtgcgtatataaaatgtatgcaattaagtctgtttaaatgatatttaagttttaaagactgtattttgttgacacatactttgtgcagtttttatgtatgtatgtattataaaaaaagttaaggttaaaaagatctcatttaatagtgagttcactatttttttttttttgtctctgggttgtaatttaataatcttcaaacaaaatgtttacgaaaaatgccaaagattctaaatcttatcatcccgtgtctgtttttcttcatgttgtatctcactgggttgctttctggctgagccagaattctgcatgatttgatttactt

SEQ ID NO: 1097 - DNA, 1481 bp, Homo sapiens
taggacccaaacaccagctgggacgtaagagcaggaccgaatcaaccttgaataaactgtatatagaaaacaattgttagttgattaagtagacattggatgtttgttagaaaggaatgttagttgtaagtgacatgttaagatttatacaattgtcaaaaacttttaggaaagattccagaatgcttttgataaaatttatcgattgtggattcacagtgtgataattaagtagggatgttgaagtcttgccaagttttcctggttcccttctcaaactttatcttcccatttctagccctgtctctctatcttacaggcatctacacctcagcaagtcagaaactaaacatcatctgtctctccctgtcttcagaaccccaaccctcataatctccttccagcttccttatttcccttaccaggactggcattttctgggcttggaatttctcggtcatcctctttttttttgttcctcgtgctgttgtcctcgtctcccaacccctaaagcctagtaggtccagtgtcaatgcattaaccacttctgttctgatttccaccacccaagtggaggccttcataacctctcagacgtcacggccatgatgccagttacattatgcctagttaatcttcattcagactggaaggacctgcccccagttgtttctttctgaatagattctactctccttcaacacttccaaagtctcctgccccaaagaggcttagttagtcctgtggctggatgtgactccaacttccttttttgtaccatcacatctttcatatctttctggcatctgccatacatcataagaggctttgaccactgtcctccactgaatagcccattacagctagcacctaatagttactcaggaaataaatacatgtttaacaggccaggtcgtagagattatttttctttctctgccttttcatgtgctgctttcagaacagagggctggattggatagattagtatgatctatcctggagattcatttcttgcattaagagcttattttgtgtgatattatttataatccctgactatgtcaattataaacttttaaattatgtcttatatttgaagttcttacctacatatcagaggaaaatataatgtttatttctaggtggtaaaacaatcttctggattcttttttctttacttgtaaattatcatttaacaagtctatattgaatgccgataattttctggaacaaaacagactacattcccttggtaaagccagacattaaacagatactttcaagcaacagcatgccatgctcagatttaagtttgaaaaatattctagctgcaatggatagcctagcaattttcaaagtttagagaagttattaatattagccctttgtagtactcctgataaatgaataacaccctggactttcaaatagtggcactgggaaaaaagtaagtagaattgagagatggtgaagagata

SEQ ID NO: 1098 - DNA, 644 bp, Homo sapiens
ccatttgcaaagcagatgtaaatctgaccctccaaagaaataactggaggttggcattgtgtcaggtataatgccatgcaggaagcctagtcctcagatgaaagcaaaataatacttaatgaacaacaacaaaaaaatcaaaccctttgtgtgttggggactactgaacagttaaatgttaccttgacttctgagtaggagccattcagagtacaacgaagctaagaattcattcagcgtcattgggactgacagcccttcagatatgatccttgttaaacaagcaccctgtggcaaaacttcagaaggccacctagtctttctgcttctaaaactcaacatgaaaaacgggttgacatttggtgaaaagactacagcttatgagctccggatatagtcaaagcagctccaaagagcagagtagaagacaaaacgtggttgagaggaactcccctctaaagagtaaaccaggggcagagcgtgtcctggatatgcacgggaacccaaggtgcagccaccaaagagggacggtctataggatgttgacatcttaaacgttcaacccgtttctaattatccttgtccttgtcctaaattagcatgttctccattgcccagacagacccacgcaccgacgttgtgat

SEQ ID NO: 1099 - DNA, 7408 bp, Homo sapiens
gcgggaggtggggcatccgggtctcttggtggctgcttctacccccggagctcagctgatcttcccttccagactacgaggtgaggtcgccgaagcatgcatgttgacacgcacggactcctgtccgacgtacattttcagacgggtggggaagacatttgagttcgtaatgaacattttcccttttctggctccgtgcttagttccgagctgccgcctcgtgctattgacagcctgcggaaccccacggaggcttgcggcggcctcttggtgtttccccgggtccgccgcttgcggttcttggagtagccaggtgaagccagaccccgagcgcgcgaggcttctcgggtgcattccggaccgcctggtgttgtcactgacgcttcggccgccgggcctggccgccccacccatccgcgtaggaagagtcttggagacctgcagttcgggatgtctgtgctgggtgttttgacctcagtccctctggccaggtgcagcgcgggagggtaaaggtgctatgtaccgaaccctggacgagaaaaagaggaggatggttgtcaagcccggctggggtgtttgatcttagtgcttcagttttttcatttatagaacgggtaaatgacatatgtgttgctggacatatttcttctggaataatgccttttttggcaataatttcttttaattttcttttcactccatgagtcactcttccttaccaagtagttttcttctgtttttgtttgtatttttgtcatttaaaagtatgttctcaggttttgcctcaaagaagttgagtttttccccaaatgaaatgagtagtcctacttttcttagtgagtatattccattaagcttgacttttaacattaaaaaatacttacaagtattttttactctgttaaatttaaggtgtgaatttcaaacttccgtaatggagttagcccacagtttattgctaaatgaagaagctttggctcaaatcaccgaagcaaaaagaccagttttcatctttgaatggttgcgatttcttgataaagtcttggttgctgccaacaaggtatggtattgctcttttttcccagttgcattaacgtgaagagattatgtggtcatgattcttaagaaaacacatgttatgttttggaaggtttatgggtcacttatggaacttgagagtattacacgaatgggaaatttagtggcaaaactcaaacctcgtttaaatccagctcattgcctatcttctttatgtttgtacctgggcagctcattgtaactggagaaaaacatggctatatgactggtgtcactttaaatttatcatcgtcacccgttgcaagtgatctctctatgctgcctaacaatcccagtgtcttcacttatctctttgaggagtcaataataggctcttttttttttttaatctgttttttcttcctgcatagccttgatttgccgagaccagctcgtttggggagaccctaacctagcggcgctagaggaattaaagacacacacagaaatatagaggtgtaaagtgggaaatcaggggtctcacaggcttcagagctgagaccccggaacagagatttactcaagtgtctattaacagcaagccagccattaacattgtttctacagatattcgattagctaaaagtatcccttatgggaaacgaaggggtatgctgaaacaaaggggtgggtctggctagttctgtgcagcaggaacatgcccttaaggcgcagatcgctcatggtattgtttgtggtttaagagcgcctttaagcggttttcaggccaggtgttccttgccctcattcgggtttcgttatggccatcatgaacatgtcacagtgctgcagagattttatttatggccagttttggagccagttcccaacattgattcaacttactttttattgtctgtgtattttatattctgtctttaaaagtagatatggcccggcatggtggttcacgcctgtaatcccagcacgttgggaagctgaggtgggtggatcacctgaggtcaggagttccagactagcctggccaacatggtgaaaccccgtttctactaaacactgctaaaagtacgaaaattagccaggcgtggtcgtgggcgcctgtaatcccagctactggggaggctgaggcaggagaatcgcttgagccggaaaggcagaggttgcaaggagccgagatcgcactaatgcactccagcccgggggacaagagtgaaactccatctgaaaaaaaaaaaaaaaaaaaaaaaaaaaaaaaaaagtagatacttccctcaaatgtctgatgatctttggctgcctgatcaaatttaaaagtgagtagtaaaaacttttctcagcagggccagtcttttaaactggacttcactgtaggctagtttggtccctgaccttagtattttaggtttctgtaggctagtcattccccagaagatacttttctactgtcgtgtctgaagagtatatagctagctggctacattcttggagttgtgggagaagactggggactttaaagttcagtatgtgaactttcactgcatctccccattttcagtgcagttttcccagaccgcaactgtgcctggactcttctagtctggacatacaatatttcactcttcccagagaataaactttcagtctgcttccataatgaagaagaggattctttctgcttattagactctcaaccattccctctatctcaaggtacatacaacttcactcccacctccaaaagcacctagggcttaaaaaaaccgtgatctcttagggggtcctgtgttgtaagttaggtcattttgcagctttccctgttgggaacagttggtttccaaatactgtgttgattctttctcctgttttctttaccctttggatttgtgctttgttgttattgttcctgttgttgttgctaccctttagtatggttttaatggaatttctatagaaacagtcaatgcatgacctaatgtaaatgacgagttaatgggtgcagcacaccaacatggcacatgtatacatatgtagcaaacctgcacattgtgcacatgtaccctagaacttgaagtataaaaaaaaaacaatgcatggattcacttgtaattgtcaactagacgtttctgttttctcttaaatcctctacaactggggatttacttccactccactgaaacagcacttgtccagccattactgatgacagattgcccagaacagtggtcagtattctgtcttatttgatccatctccatcttttcaccttgaaacacttaaaacgtctttaattttgttctgaaattgataaatacaagagtgtataaaacaggaagcataatatgaatatctgtacaccctccacccaaattaaacaataagattgttatcattgctttgcacagtttgtgtgaagttttcttcctgttcgtggcttcccaagacgctgttaggttttggttcctctcccacttcactaactactacttcttgttcttttttaactcttcctcagttcagggcatttttttttttttaatctgtacatattccttcagtgatatcatctaattgtatgatttttactatcatctataaaataatgattcccaggataatgtttactccacctctttcttatctaagtggcatctcagagttaacatacccaaaccaaattcttgatttctcctcccaaacctgccctttcccccatgttctctatctcaggaaatgaccatttcatccttctagttgctcaagggaaaaccatagagtcatttttgacttccctctttttctcaaatttcatgttgtattcaccagcaaatcctatggtttcatccacaaacaaatccagagtttatttatcatctctatggttaccgctattatctctcatctggattattgcatctgcttcctatttggtcatgatgctttccatttatggaccatatagagtattcttagaagtcagagtgagcctgttaaaaacatttagatcacgaccctcctctgcttcaaactcttactcagagtaacatacaaagttctcttactgagagtgacatacagagttctatagtggggtgcaagagattacctgatgtggtcccttctatccttctgaattcatctcttactactttctcttactccactgcagccaaactggccttcttggtgtctttaaggatgctaagaatgctccaacctcaaggcctttatacttgttccttcagcctggaatgttcttcccctgggtatctgcatggctcaccccttcacttcttttcagagagaggccttttctaattaatccacgtaaaacagtaaccacccatactattcatttgtttgtttggtaaactctgtccctcctcactagaatgtaaacttaatgagggcagggacttgtttgtctattttgttcactgttgcaccctagtatgtggcatacgttaagtacataataaatattgtttgaataaataaatgaattctagatattgattatgggtagagctgggtatttttttttcctgttgtctagggctcttcagtttcttttggtttcatttgctgacctgtaactttatgaactactgacttcacttttacataggaaacctatctgggttgtaagacatcagttgtccatacacccaatattttgcatcctttggctgttggtttatttcttagtaagttggtctcataactttttgaatcagagtcactttattggagctaaccttttggctttggaggagcatgaaggagaatatttaatgtaggaaagaatggctcatttcttacagaacttttcattaacttgaaaattctcacggtttatgtttaatacaatatagatttttaattattagagtgccttaagtgttaagtgttttttattttgattaaaaggtaacaaaaaaaatttttaatgatgttcttttaaaaattttttttgtaacagaccgatgtaaaggaaaaacagaaaaaacttgttgaacaattaactggattaataagtagttcacctggaccacctacacgaaaattattagctaaaaatctcgcagccctttatagcattggggatactttcacagtttttcagacacttgataaatgcaatgacattatcagaaataaagatgacactgcggcctacttaccaacaaaattgtaagtacttactttaataggggcccttgaagttttattttttctttcaaggaaacttagtaggagactatggaccataaaaacccccaggtgggtggaacctgcgacatgctgctaacagtgagagctctaagtggatcgagttgtgatgggaagatagttaaattttaggcatgctgattctggaatacaaatgggaatatccaaatgacagtgtaaaataggtagttggaaattctagttgggattttagagatttgttgggaatgtagttttggtgagtaggctgaatcctttgatatgagtaaagttacctaggaggagtagtatatttgagaagagaagatgcctagggatacaactctagaacgtcaacattcaaggggccatggtccgtgtaatagcttacagaggaaatggagagattattcaaaacctggattctaatttttaggtctacttttaggtagttacctggtatcactaggtaactacctagatatattgtgattagatttttgtgttttgtttaggatagatgtagacctcaaaagttttagaggagattagacagtaccagtactttctagtttgttttgaagtttgaagctatgttaatactttaatgatttagttcactgccacttagcaaatacacacataattttatagttctggttaagtagaattgattatacattcatatgtatttccagtggatccatgggtcctatttaggaaatctctaatgtatgccggcatgtgatgccagtcattttaaatttattatcagcctacagggtatcaaaaagcatgagatttggagttgaagaggtgaaagttgattccctgattctactgtttattatgtgtttgattgtgagctaaatttagttaacctctcttatctgtaaattgctcagatcacatagcttttatttatttttatttgttggagcgggaatgactcgcctcatggtagaccacctgcccacttccaagatccaactacacatagctattagatggtaggttctaggatttaggcacaggtctgctagactccaaagcatccgctcttaaccaccatgtcctacttttgcctttaagctaaacccacagctattcacttactattgacctaagtgacactggggtcatttcttgctcctgaagaagtgtgttgctattattactttattcttccaagtgttctgttaatgtaatttagattaaattttacaggtttactaatagtatagtattatttgtaaattaagaggtagacactgtgagcaatgcaaatatgtgagctatattccgtttctggagtttacatttccactggcaggacaagatagagacatataaaatggtcaagttacaacacagtaaatgatataattttgtcaaaatcagtgattgacattaagtgttacatataatgaaagaagagagggattgttgaggcttgacataatttggaaagtcttcatagaagcaaagcttaggggccgggcgctgtggctcacgcctgtaatcccaacactttgggaggccgaggcaggcggatcacctgaggtcaggagttcgagatcagcctggctaacgtggtgaaaccccatctctactgaatatacaaaatgagctgggaatggtggcatgcacctgtaatcccagctactcaggaagctgaggcaggagaatggcttgaacccaggaggcagaggttgcagtgaaccaggaccacaccactgcactccagcgtgggtgacagagtgagactttgtctccccctaaaaaaaaaaagaaaagcttggatttcttcccaaagaatgggtatgatttattatgtacatatatagattcttttgtattcctaacaagaatacaatttaactatagtatttaacaagaatacagtgtaaatagagtatagtatttgttgcagttatgaagcataaattgtttttgatagttgaaattaaggattatagccaaaagtgtcctagacaaatgcaaattgatttctaaaaatgagaaaagtataattgtatcattaacctggacaatgactagtgaagttgtcacttcttacagggctgcggtggcttgtgtcggagcattttatgaaaaaatggggagaatgttgggcagcgcatttccagaaacggtaaat

SEQ ID NO: 1100 - DNA, 418 bp, Homo sapiens
ccccactgcagaggtactgcttgtgctgccctaatgaatacactcttcctcgcctcctgaatttgctcttttacctaaacggaaacaaatactgaaaatataagacgtgttattgcaaaaagaaggagtaaagtcagagtctgtgactttcccacacatcagtggaagctggtgttttttgaatagaagtcatctctgtatggctggctgtcagacagaacctcccacacagaagggacccacactgggtttctttctcctgtcttaccatcctgggattcttactgattatctttaaacttacagtttataactgaagtctgatgggacactggagcatgggcttgagcagatgaaatatgtggaagcaaggaaggagctttgtagtttagtacttaatagcacttccccctgcttt

SEQ ID NO: 1101 - DNA, 680 bp, Homo sapiens
aaacaccatgcagaagctgtatgattttggacccccttacctcaatctccttatctgtgaaatgggaataataaaatctacctcacagaattattaacagaattaaatgagataatccatggaaagctagtagcagcatgactaacacagaagtaagcactgaataatgtacacatgttgatgacagttgatttttatatgcgttcttatgtcatagacatttgttgttattaaaaatatcacaggggagcgtggccctgctgtaaaaaaaacattacaagatatcatggtggtggagaatgattccattgtggtgacttccatcacagctctcagctgtgaaacagccccagggccctggaaaagagcccccaaggacttagtttctaagaagaaggttcggcctttggaggggaacagtttgcccattgcctccacaagctctgctttctttccctagcctggagatttttgtgatattcatagtaaggaaaataaatttttgtcttgacttagtaatgatagttaatgggtactataataaacagtcctacaggccaggcgcggtgactcacgcctgtaatcccaacactttgggaagctgagacaggcggatcacctgaggtcaggagttcgagatcagcctgaccaacatgatgaaaccccgtctctactaaaaa

SEQ ID NO: 1102 - DNA, 680 bp, Homo sapiens
aaacaccatgcagaagctgtatgattttggacccccttacctcaatctccttatctgtgaaatgggaataataaaatctacctcacagaattattaacagaattaaatgagataatccatggaaagctagtagcagcatgactaacacagaagtaagcactgaataatgtacacatgttgatgacagttgatttttatatgcgttcttatgtcatagacatttgttgttattaaaaatatcacaggggagcgtggccctgctgtaaaaaaaacattacaagatatcatggtggtggagaatgattccattgtggtgacttccatcacagctctcagctgtgaaacagccccagggccctggaaaagagcccccaaggacttagtttctaggaagaaggttcggcctttggaggggaacagtttgcccattgcctccacaagctctgctttctttccctagcctggagatttttgtgatattcatagtaaggaaaataaatttttgtcttgacttagtaatgatagttaatgggtactataataaacagtcctacaggccaggcgcggtgactcacgcctgtaatcccaacactttgggaagctgagacaggcggatcacctgaggtcaggagttcgagatcagcctgaccaacatgatgaaaccccgtctctactaaaaa

SEQ ID NO: 1103 - DNA, 93 bp, Homo sapiens
acaccgtggaatactatgcagccataaaaaagaatgagttcatgtcctttgcagggacatggatgaagctggaaaccatcattctcagcaaac

SEQ ID NO: 1104 - DNA, 93 bp, Homo sapiens; identical to SEQ ID NO: 1103

SEQ ID NO: 1105 - DNA, 119 bp, Homo sapiens
ccagctattcgggaggctgaggcaggagaaacacttgaacccaggatgtggaggttgtggtgagccgagatcgcgccattgcactccagcctgggcagcaagagcgaaactccgtctca

SEQ ID NO: 1106 - DNA, 119 bp, Homo sapiens; identical to SEQ ID NO: 1105

SEQ ID NO: 1107 - DNA, 2527 bp, Homo sapiens
aatcagtttttaaaatatttagtctaagatgattcaaagtagttttattttaatacaggacttttaaatggcagtatttcatttcttgtcaattatgttggtactttccacaaatctataaagaaggataaattgtaccatcattttattataatcctcaagagaaaatgtgtaattcaaaagattaatgtgtattaaaacacattatgtatcttagttacatttctatcagtacttttattaatatttgtgaaagaagacagcttaatagtagttagcttaagtagtttctccaagtacttttgtgctatcaatgagttcttctcaaaaaataattagttaggccaggcacaatggctcacacctgtaatgccagccctttgggaggccgaatgggcagatcacttgaggtcaggagtttgagaccagcctcgccaacatggtgagaccctgtctctactaaaacgataaaaaaaaaaaaaaaattagccaggcttggtggcacacgcctgtaatcccagctactcagatggctgaggcaggagaactacttgaacctgggaggtcaaagctgcagtcagccaagatcttgccactgtactccagcctgaagagcgagactctgtctcaataatataataatagttattatttaattgcaacatgaagttggaagccattttctgttacttctttaaggagctaaatcttttatatttttgttttctctccccttgcgtttcatattttagcttatgatctaaatatatattttgtatattataatattttaggaatagcttaattaagaactcacagactttgacaaagtggtaactagacttttaattactagattcttcaaattaggcttaatgcctgctagcatgccaatccaatcccatgactgatgttattatacactatggcaaatacaaagttgtagtattatggttcttgatggtgtgatttacttatgtaaattatgtacaaatttaagttcaatgaaacactgatttaatgtactgaaaggtaaatagtaccatagtgaattattttctgtcttgccttaggtttatttttattatcttcaatattagaataaatgctaaattattttcatttaaggatttatgtagttgaatattatcatttagtaatatttaatcatttgaaataaaatttaaagctttaattgatctaatagagatggttttctacttttccactcttcctccctcttatgccttcacttttgttttctgtgcccagaattttcttcacattctttactacctgttttgtctattatatccaacccattttctttttattataattttgatttggggcatttgaagaaaatacagcaaaactacaagaactggtaataagcatgcataatctcacctacttagtgaacctaatataaacctaatataaagaaccaccgtatttgcaatatatataactggtgaaaaactagtgtccagaatatataaatgatccctatgaatcagtaagaaaaagacagtcaatagaaatttggacaaaagactttatatggcatttcaagtgaaaggaaatccagatgaccaagaaacatgaaaatattcccagccatattaatatttgagaagtaaaaaataaaactacaaggaggtattacatctttaccttatttgcaaaaatgaaatgatctaatgatactaagttttggtgatgatgtcagctcttacattgaaaacaatcactgtggaaaaatttgtccctcagtaaatttaaagataaacatgctcaaaacctagcaattgcactctgaagtatacatctttgcaggttatctttcattacagttatttttttccctgtcaggaccctaactaatacaatgccttgggaaaactaatgaacatgtatcctaggaagcatgtacaagaaagttcttcccagtcaggaaggtggccaagaaaaaaattttttaatgttcatagcagcactgcaatatccaaaagttagaaatgaaccaaatattcagcaatggtagaatggttaaattgtaccatggcatttatattgaaacagtagaattctacacagtggtgaaaatgaaggaaatagctaaccacaacatagatgaatatcacagacatagcatagagcaaaagaagcaaatcacagaaggatgccatcaacatgattccatttgtataaagtttaaaacagtataaactgaacaactatattgttttaagggtatatagttatatatatgagatacaactgtaaagaaaagcaagtgttttgctgtccccagaaccagaataatgatttcctctgtggagaagtacagcagtgtgattggggagtggcacctggtgcttctgggatgctggcaatgttctatttcttgtcttgggtggtgattgcatggatgttcacttttaaaatactctttatacatatatattttatatattcttgttcatatataacctttataataaagagaaaaaaatggcaaaaa

SEQ ID NO: 1108 - DNA, 10806 bp, Homo sapiens
taggacattcagtgagataaataaagcggaagagcaatacagcctatgtcaagaactttgcagtgagcttgctcaggatctacagaaagaaagacttaaggtgctttattttgatatggtgtccttagtttttaagttttttaatagtaaaatgctaccttaaaagctagagttagattacacatttcttaaagatgaatacaaattaataaacgtcagaatagtgtattcctatccccaacagtcagatacaaatccaattctgacccatatctggagtctgtgatgaggtgattctatgaagaagcaccttatgagaatagagtggttcagtataattcagaggactttacttctgtacctcaggagtacatttgaataagttaaaaccaaagttacactggcattagagaataaggcaaaagaaaggatttccagagaattgtattcacatattacaaatgtctttccaatcatcctttaatgtttttcttacttagacaatgaccttctaaaataggcattttgtttcaaggttgtagtccaggttgcttaacacaggacaacaaaacctataaggctttgaacttgctattttataatcttcactcacaacaatttatatttagtgtattcccaacactctcaaaccagaggtagagtcagtacaaagcgtaataaaaaggtattttaaaattgctacacaggtacaaatatctggtttgatagaagaaataagacctagtgttcaatagatcagtaaggtgactatagtgtacagtaatctgtgttacataccagaatagctagaagagaataatttgaatgtttctcgcataaagaaaatacaaatatttaaggtgatagatatccgaagtacacttatttgatctttacaaagatcaaaactatgaggtacatgtgataatttactatgttcatataatgcatcagtaaaactattatgctaatcagtaaaaaatttgttttaaaaaaattactacaaagagtggaatatctgatgagtatctttctctatcataccttgaatttaaagaattttctttttaaaaaatatttaaataaacatttaattttatgatcattttagatttccagaaaagtcacaaaaataatagaatttcagcatactcctcacctggtttcctccattattaacatattaccagagtacatttgtcaaaaataagaaactgacatttaatacattgtcaattattaaccccagactttatttggagtttacttatttttccattaatgtcgtctctgccttccagaattcagtccaggggactacattgcatttagctgtcatgtctctccagtttcctggtctgtgatagtttcttagtttttccttctttttcatgaccttgacagtgttgggtagtactatacaggtattctgcagaatgtcgcccaatttgggtttgtctgatgattttctcatgattagatcagggttatggatttttagaaagagtatcacaaagaggaagtgtccttctcataacatcctatcatggggtgtataatagccacatgatgtcatggttgatattaaccttcatcacttggttagtgtttgctaggcttctccactgtgaagttagtgtttttccctttggaagtaagtcagtaaatctaactaccctcagatgagagagagcaggaattaacttcctcctccaggggatactaaaatatacataacataaaatttacattttaaccatttttaagtgtacagttcatattgttttataaccatcaccaccacccatctctagaactgtttcattgtctccactgaaaccctgcactcataaaacactaagtgtaaagggaattcttacattaaattgtttggcatagcatctggcaatgcagaaggcacacaataagtgtgaactattcataagtcgttttcagtgagacacttttagaaagatttttttccttcctttgtaggtaattaatcaacctccaaaagagattcagtaaaaataaaagtgatcatttaacctttccctcttgtaatggtcttttataaaaattcagttggggggccaggcacggtggctcattcctgtaatcccagctctttgggaggccaaggcagggggatcacctgaggtcaggagtttgagaccagcctggccaacatggtgaaaccccatcactactaaaaatggtggcgggcacctgtaatcccagctactctggaggctgaggctggagaatcacttgaacctgggaggcagaggctgcagtgagccaagatcccgccactgcactccagcctgggcatcagagtgagactctgtctaaaacaacaaaaaaaaaaacaaacaaaaaaattcagttgggaaggggaataaaaattactggctaaaatgggattttaggtcaggcatagtggctcatgcctgtaatcccagcacattgggaagctgaggccagaggattgcttgagcccaggagttcaagaccagcctggacaacatagcaaaatcacgtctctacaaagaaaatgtaaaaattagctgggcatggtggcacgagtgtgtagtcccagctacttgggaggctgaggtaggaggatagcatgagcctgggaggtcaaagctgcagtgagccacgatcatgccactgtactccagcctgggcaatagaatgggacccccatctcaaaaacaaaataaaatgggattttagcttatgtttggaaagggaagtaaacgtttttggctaaaatggtattttaattattctttttttttctgagacagagtcttgccctgtcacacaggctggagtgcaatggtgtgatctcggctcaatgcaacctccatctcctggcttcaatctattctcctgcctcagcctccccagccgctgggattacaggtgcctgccatcacgctcagctaatttttgtatttttattagagacagggtttcaccatgttggccaggctggtcttgaactcctgacctcgtgatccgcccgcccaaaatgctgggattacaggcgtgagccactgcagccggcctcttattctttatgatatgtttatcaccatgttttataaataattggttataattccatattcttatgtccgtaaacctttctgaatttttctaacatgtaaatgacttttttctagaagttaggaagtcatacagaataatgtattctggttgggtgcagtagctcatgcctataatcccaacactttgggaggccaggatcgcttgtggccaggaatttgagactagcctgggtaacatagtgagactctgattctacaaaaaaataaaaaattagctggtgtactggcacgcacttgtaatcttagctactcaggaggctgaggcaagaggattgcttgaacccagaagttgaaggctgcagtgagctacagctgtgccagcgcactccagcatggacaacagagagagaccctgtctcataaataaataaataacatattgtatatgttatagggtagaactgttaccattaagttgaagaatgtgaattttgaagtaaaaactcgtgcatctacagtttcatctgttgtttctactgcagaagaaatatttgccattgctaaggaattgctaaaaacagaaattgatgctgattttccacatcccttgagattaaggcttatgggtatgactttttcatttttttgtttttccttaaatctgctagattttcccaaataatcaactttgggaatacagggggcccccaacttaacaatggttcaacttaatgatttttcaactttgcgacagtgggaaagctgtatgctttcagtacactcttgacttacaaggtggttacatcccgataaacccatcataaattgaaagtattgtaaattgacttattatgttttcaatttacagcgggtttatctggatacaatcctactgtaactcaatgagcacctgtattctcgccttcattttatttcttaaacctgtttacgaagttcttcctttgctgctgccatttgtcttagttattagaccctgatgtgtgaagccatgatcacttagtttaattccagtaagggtcaattaaagttgttattttccttataacttaatgaaattcttgtggccaggtgtgtttcaaaattcaaaacttttcagattttagaaagcaaattcagtgcatgtagagtatattacgttgtaatacttctttgtggatctggggcaacaccccctgttcaaacacattaatatttctgtagcaaaacaaaatattcagagactgtaaagactgatgacattaatttagtcatcaggtatcacttgttgcttacaattttcagaactttttggattttggaattacagataaaggattgtgacattgtgaaatcacatctccagccactacatggtaaaaagtaacaagccatgtttccaaagtgtactggttgaaagtatatatgtggatcaccactccaaatgcacattttactagtaaggagtgggtcactagccataattttatttatgaaagatatagcacacactgaaatcaactgaataaagtgttaattgaaagagccaggctgggcgcggtggctcacgcctgtaatctcaacactttgggaggccaaggcaggtggattgcctgaggtcaggagttcaagaccagcctggccaacatagtgaaactgcatctctacaaaaactacaaaaaattagctggacatggtggcgggcacctgtaatcccagctacttgagaggctgaggcaggagaatcgcttgaacccgggaagttgcagtgagctgagatcacgctgttgcactccagcctgggcaacaagagtgaaactccacctcagaaaaaaaaaaaaaaaaaaaaaaaaagcccaagagcagatatctatagaagcttaattcataattgccaaaactttgaagcaagcacgatgtccttcggtacgtgaatggataaataaactgtggtacatacagacagtggaataatattcagcacagaaaataaatgaattatcaattcatgaaaagacacgaatgaaacttaactgcataatgttaagtaaaagaagccagtctgaaaaagctaaatactgtgtgattccaaccatatgagattctggaaaaggcaaatatgagtaccataaaaaataattgattgtcaggagttaagaggggcaggaggtataaataggcaaaacacaggaattttagggcaatgaaatgattccgtatgattctataatgacacgtcattataaatttgtccagcgcccaggatgtattccaagggtgaaccctatgtaagctatggactttgagtgacaatgttgtggcagtgtaggtttatagattgtaacaaatgtaccactctagtgccacatgttgatagttggggtggtggaggggtgtgcatgtgtagggaaaggggatctttgggaactcattgtaccttctgctcaattttgctgtgaacctaaaattcctctaaaaaataaagtctattagaaaaaaaagagctaaagagtctgtatagttgactccagttagttactggtattaatttaatggtattatgtgtcacatatgaattaaaatcctacatcattatactaactccaaatagttaatatttaatgatattcttttataaaggaaggtaaatctgtacttataataccagctttgaaatgttacttatagtttctctctagccaaccttttgtatatgtcatagcactagacaaaatgtttttatgcattgtgagtgaattggctttgttcaatttgaaattgattgtgattggtttaatttaggtgttcggatatctagttttcccaatgaagaggacaggaaacaccaacaaaggagcattattggctttttacaggctggaaaccaagccctgtcagccactgagtgtacattagagaaaactgacaaagataagtttgtaaaacctctagaaatgtctcataagaagagtttctttgataaaaaacgatcagaaaggaaatggagtcaccaagatacatttaaatgtgaagccgtgaataaacaaagtttccagacatcacaaccattccaagttttaaagaagaagatgaatgagaatttggaaatatcagagaattcagatgactgtcagatacttacctgtcctgtttgctttagggctcaagggtgcatcagtctggaagccttgaataaacatgtagatgaatgtcttgatggaccttcaatcagtgaaaactttaaaatgttctcgtgttcacatgtttctgctaccaaagttaacaagaaagaaaatgttcctgcttcttcactttgtgagaagcaagattatgaagcccatccaaaaattaaagaaatatcttcagtagattgtatagctttagtagatactatagataactcatctaaagcagaaagcatagatgctttaagtaataagcatagcaaggaagaatgttctagtctcccaagcaagtcttttaatattgaacactgtcatcagaattcttcttctactgtttcattggaaaacgaagatgttggatcatttagacaagaataccgccagccttacttatgtgaagtgaaaacaggccaagctctagtttgtcctgtttgtaacgtagaacaaaagacttcagatctaaccctgttcaatgtgcatgtggatgtttgcttaaataaaagttttatccaagaattaagaaaggataaatttaacccagttaatcaacccaaagaaagctccagaagtactggtaagtgtgtaattgttttaaactgcatgattttctaggaatatgtattattaaaattaatgagattgttgttaaatctgaaacatatactattaaatgggtagtttgtgtatgccgccatttagggaaatgttggttacattgccataggttagaattaactcaagcctgtagattgtgaatttggggaaaactttggtttgatcttgatttagcacagaatgaactcaaaggtttaaggagctgagtgatctaatcaaacaaattccttcagagaacatctgtgaaggcacagtggtaaattaactataactgcataactagaaagcctctttaacttattttttggtagtgctgactctacccaaatttcaccaataaaattaagtgtaatgctaataaaattagtaaattacaaagaaattatagtttttggtgtgtttacatatgaactatatagtactaaggaagtttaatcaataagttttaactttttaaatttgtatacaactttttaattatttcatattattcattatggaatttcttgactttctttcctctaaaggtagctcaagtggagtacagaaggctgtaacaagaacaaaaaggtatggctaatttgagctttaataaagctggctacaatatgaaaattcaattattttataaattattaagtaatcaatattaaaaatgaattattttctagaatctcttcctgcattttaattgtgtgttccttttcattctaggccaggattgatgacaaagtactcaacatcaaagaaaataaaaccaaacaatcccaaacatacccttgatatattttttaagtaaacattgaacattttatcattaatttttaattgaaactagttattttataatcaatgaatttgttctttctgattttaagtttgcagatttatttagtgaaggcaagtgcaataatccttcctcagatgatgtttgcttttctaagatacatatactgattctgtgtatcttttttataaccatgagaattttacttccattatacatcaattggaaatcaatcctgttaagagataattcttaaaagggaaattaggaatgggataagaaggtgatttttttattatttttatactgaatataaaaacatttgtaagggctctcaaagattcacacatgcctatattatcataagaatttttcagcacttaactactttgttggcattgatcctagtgtctttaaatacttcatgagcattcataattaaaatttatcttaagttctatgaagagtattaatgtaactagcataagtggttttcttcaggaaaataaatatcacagtattatctgtgttaaaatggtttttgcctaaaatataatttttaatttggcttttcttatttaaaattccattatcttatgaataagcacttgaatcagtttttaaaatatttagtctaagatgattcaaagtagttttattttaatacaggacttttaaatggcagtatttcatttcttgtcaattatgttggtactttccacaaatctataaagaaggataaattgtaccatcattttattataatcctcaagagaaaatgtgtaattcaaaagattaatgtgtattaaaacacattatgtatcttagttacatttctatcagtacttttattaatatttgtgaaagaagacagcttaatagtagttagcttaagtagtttctccaagtacttttgtgctatcaatgagttcttctcaaaaaataattagttaggccaggcacaatggctcacacctgtaatgccagccctttgggaggccgaatgggcagatcacttgaggtcaggagtttgagaccagcctcgccaacatggtgagaccctgtctctactaaaacgataaaaaaaaaaaaaaaaattagccaggcttggtggcacacgcctgtaatcccagctactcagatggctgaggcaggagaactacttgaacctgggaggtcaaagctgcagtcagccaagatcttgccactgtactccagcctgaagagcgagactctgtctcaataatataataatagttattatttaattgcaacatgaagttggaagccattttctgttacttctttaaggagctaaatcttttatatttttgttttctctccccttgcgtttcatattttagcttatgatctaaatatatattttgtatattataatattttaggaatagcttaattaagaactcacagactttgacaaagtggtaactagacttttaattactagattcttcaaattaggcttaatgcctgctagcatgccaatccaatcccatgactgatgttattatacactatggcaaatacaaagttgtagtattatggttcttgatggtgtgatttacttatgtaaattatgtacaaatttaagttcaatgaaacactgatttaatgtactgaaaggtaaatagtaccatagtgaattattttctgtcttgccttaggtttatttttattatcttcaatattagaataaatgctaaattattttcatttaaggatttatgtagttgaatattatcatttagtaatatttaatcatttgaaataaaatttaaagctttaattgatctaatagagatggttttctacttttccactcttcctccctcttatgccttcacttttgttttctgtgcccagaattttcttcacattctttactacctgttttgtctattatatccaacccattttctttttattataattttgatttggggcatttgaagaaaatacagcaaaactacaagaactggtaataagcatgcataatctcacctacttagtgaacctaatataaacctaatataaagaaccaccgtatttgcaatatatataactggtgaaaaactagtgtccagaatatataaatgatccctatgaatcagtaagaaaaagacagtcaatagaaatttggacaaaagactttatatggcatttcaagtgaaaggaaatccagatgaccaagaaacatgaaaatattcccagccatattaatatttgagaagtaaaaaataaaactacaaggaggtattacatctttaccttatttgcaaaaatgaaatgatctaatgatactaagttttggtgatgatgtcagctcttacattgaaaacaatcactgtggaaaaatttgtccctcagtaaatttaaagataaacatgctcaaaacctagcaattgcactctgaagtatacatctttgcaggttatctttcattacagttatttttttccctgtcaggaccctaactaatacaatgccttgggaaaactaatgaacatgtatcctaggaagcatgtacaagaaagttcttcccagtcaggaaggtggccaagaaaaaaattttttaatgttcatagcagcactgcaatatccaaaagttagaaatgaaccaaatattcagcaatggtagaatggttaaattgtaccatggcatttatattgaaacagtagaattctacacagtggtgaaaatgaaggaaatagctaaccacaacatagatgaatatcacagacatagcatagagcaaaagaagcaaatcacagaaggatgccatcaacatgattccatttgtataaagtttaaaacagtataaactgaacaactatattgttttaagggtatatagttatatatatgagatacaactgtaaagaaaagcaagtgttttgctgtccccagaaccagaataatgatttcctctgtggagaagtacagcagtgtgattggggagtggcacctggtgcttctgggatgctggcaatgttctatttcttgtcttgggtggtgattgcatggatgttcacttttaaaatactctttatacatatatattttatatattcttgttcatatataacctttataataaagagaaaaaaatggcaaaaa

SEQ ID NO: 1109 - DNA, 16386 bp, Homo sapiens
ggtttctggaataggaaaagttacagagaaaatgttaaaggcccttggaattattacatgtacagaactttaccaacagagggcattgctttctctccttttctctgaaacatcttggcattatttccttcatatctccttgggtctaggttcaacacacctgacgaggtatctatatgtattgtcattctgctttttcttcagcatttgctgcaatatcagttttaaccattgagatgaggctatatggataacatgttttaaaattctttcaggctagtttaattcaaaatataatgtttgaattagagtcaacagattggatgtaggaggaaagaaaagaagaataaagaatcactcctaggttgtggtgtcagcagttgtgtagagagacaagaggaatgatagtttcttttttatccctaccttgttctttgttcagaacctaagagaaatgccagtagtcaggttgttgtggaaagaaagatggccgtattccataattcaccctttaaggaaggagatgtaatgattcttcgaaagccttaaactacatttcttttcttttccggattcattcattcagtactgactactttactttgtgttaggcactattctaggcactgtagataacagcagcgaataggacaaattcctgccctcatggagtttacagactagtgtgagagatagaaaataaccaaataaacaaatgaagaaagtaaagcagagtgagggtatagaaaatgactggggggtaagtgtgagggttagcaaccatcatccaaaggcggagagacctgagggagccagccatgcaaaggctggaagagggaacaggtggaggaaataccctgggttttcttccctgccactctttcatctaggtcttaaaaagaggaaccctagaggtagaaggtaaattgttgtgggatagtaggtgaaaagaaggaaattttaaaagactgggaatcgtggaagtcaactctgggcactatttttacaattttgtcatcaccttgtcagcctgtcctcaaaatgactcctttatattcttgtatttaaactaaaggacaacaatagaaatcaatgaggatgcatataaaattgatggactaattaagcctactaaattttacagagattgcaaggcttgttgtgttgcttttctcatctcttcctgctcttcaatcttttgagtccacagttagctgactttgatcttcagtgggcataatgaaagatgaagatatcacagcactataaataattatatttgaagatagcaggaaataaaactttatttttaatccaaaaatttttttatttccatagtgcttgaaaacaatatagttctgatgtaacataacatatattaacttgtggtatttagagatccaggtaaggcttttacatgcaattcataggtaatttataataacaaataccaaacctgcctttccctctgtccatattctctattcccctattctgctttgctttttaatctgagtacttctcccattctaatccattccatatttactactatatttgttatctgtctttctccaatatataagttttctgagggcaagtacttggtctatttccttcattactatatcctcaagttctagaacagtgcttgaatcataataggttcactaaatatttggaaaatgagtactctacatgtcatttcaactttttggttttaactaatcctgtcagagcagctagaatacagccaaactaggtgattcagattcccaatcttcatcctatagctgtgtaccaaattctgactgaggttctattatagagtggtataaatgaataatgaataggctatgggagaaagaagttaatatactaaaccaaaaactagataactgattttaaattatttaacatttaattatattttgtaactggaagatattacgctatcacttcctatttgtttttataagttgtggtttttgatagtcaggtttttaatagaagcaatttctaatatctacctattttcaagtttgttctcttcaatagatatagacttgattcataatcatattagcatcttacctacctatgttctttggtgatttgtttttagataaaaaactgtttttcatgatgtataaattttaataaaaaatttgagagctctaaaaggtaattgataatgttaaatcctcttggttaactaaaaaaaactcagtctttgaaaaataaagacctttttttttcatttcaagggatggagagaggaaaagtatgagcgttgagaggtaatgttttattatttattgttaattgtgcataattcatgttattttaaactaatattgaattaatttttagtaaatatcactgaaataagaaatctatttgcaaattactataacagtttttagtagtttacactccctgcaataaatgccttagtataagactattattttcagttgctataatctcaaaaattaacttcagctattttttaatgttggttttaatcctacctagtgaaaaccaagcattttagaatttcatatcttaatttctagcttgtttataaggacaattgagtatttacttcggaaatttaagaagtaacaatgggaattcttcctaaaattctttcaacattggtgattaagcagaagcttaatcaaacagtaaaatattactgataaaagagagcttaaagatgatctagtttagtggtttacaatcctgtttgaaaaccaaatgaaataatgatggaaacttaccgtttggggaaataagtcattgtttgaaacatccctcaattatctcctcaaagcagcaagtttccactgagacatttaagaaacactgacctagggcccggcaaggtggctcacccctgtaatcccagcattttgggaggctgaggtgggcagatcacttgaggccaggagttcgagaccagcctggccaacatggcaaaaccctgactctactaaaaatacaaaaatcagcccggtgtggtcgcttaaactttaatcccagctacttgggtggctgaggcacaagaattgaacccaggaggtggagtttgcagtaagctgagatggcaccactcactccactccagcctaggtgacagagtgagactctgtctcaaaatcaaaacaagacaaaacaaaacactgacctagtacaagattgtgttcatatttcacatatattatttgtggtcagaaaagctgattaacttttacaatacaacataataaatggctttgataaaaattgctattttaggttttggtccatatgaaagcaatcaaagagagagagaaaaaaaaaatccaaaagcaaaatagtattgccatatttgataaatttctctgccattttctctgctattgggaaaactattttatgtacaggaatgtgttctccactttttttttctggaaactttctccccttggctttctaaaatgggcaatataacatcaaatttggtatgaagttgggggaaaggaggttgcaatttatatcacaaactaactaacttctctaatatagaaagaactcataatcaataaaaaggaacagtaagccaacagaagaaatgaacaaagttctaaataattaacagaaaaggaaatacaaatggctcttaaaacaagtgaaattactaccattttcatttataattaaagaaatacagattgaaagttctctcagatacctttctttcactagtcaggttggcaaagattctaacatactctattggcaagactgtaggagtgaaaaatgtgtaaactttagagggagtacattaggtttttttattgctattaaaacaaatttctacaaatttagtggctcaaaacaaaacaaatttattctctatcattctgaaagtcagcggttctaaagttaatgtgttggtagagttccatttcttctagaagctctgggagagagtccatttctttatgaaaagcttctagaggccacagaatctttggctcatagcctcagcaacttctttctctgactctaaccctcctgcctccttcttataaggacccttgggattacgttgggcacagctggacattccagagtaatctctgtccgtcagaatttaatcacctctgctaaatcccttttgtcatgtaagatactaggttcacagattccagggattaggatgtggacatctttagggaccattatctagcctaccacagggggtaagaaatttcataatatgtatcaaaatcacagatacacatgtactttgatgccataattcttttactaagaattaattccacagatttagtcacatgtcattttacatatatacagggttactcactgcattttttatgatagaaaaaaactgtaatatccatgaatagagaattggttaaattaccttacatcattaaattagaatattatgctgctgtataaaaatgaggaaatcatttactcatggggaactctcaccatgataaattgagaaaagcagggtactaaacaatgtatctaaaattctactgtttatataaaaaatgagaggaaaatgtcttcttgtttgcttattttatatatatacacacatacacacacacacacacacacacacacacacacacacacacacacacacacgtggaatatttcttttttttgtttgtttttgagagggagtctcgctctgtcgcccaggctggagtgcagtggtgcgatctcggttcactgcaagctccgcctcctgggttctcgccattctcctgcctcagcttcccgagtagctgggactacaggcgcccgtatacgtggaatatttctaaggaattcataagaataagaagctgacacattggttgccactagggaagagaactgagtagctgaggataaggttagaagtagaaaggggactctttactgaagagtcacttgctcagggtccatactcatcattctggtctctttgtattatcctcttttaagttaatatcacttgtcaacttctttcaacacttttttgcagatgaattcaaaatacctacatttaatcttatcagccttctattttcagctgtctattaaacaactctgcgtaggttccatgagccaaccccttaaatctacttaaagatgtttctcatccataaaatccatgtgcagtaattggaatgatgttctcatttggactttcttaagataatcttctgtaataaagtctatatatacatataccctaatctgttttaagttctggaggcattaccattatctgttggtaattttaattatcttttttgtgatataatagagcaagagcataaaattgtttctttgctaatcaagctttcctgtttaggtgggtttccattatttatatagatcttagatgtttttacttaattaaattttagttcatctgaaaactttattttgtaatacagaaaaatataacttaatgctagccatataaacatgcataccatttccaaattatcctggattatagtttactttgtgcgccaaaattattcttgtctttctaggacattcagtgagataaataaagcggaagagcaatacagcctatgtcaagaactttgcagtgagcttgctcaggatctacagaaagaaagacttaaggtgctttattttgatatggtgtccttagtttttaagttttttaatagtaaaatgctaccttaaaagctagagttagattacacatttcttaaagatgaatacaaattaataaacgtcagaatagtgtattcctatccccaacagtcagatacaaatccaattctgacccatatctggagtctgtgatgaggtgattctatgaagaagcaccttatgagaatagagtggttcagtataattcagaggactttacttctgtacctcaggagtacatttgaataagttaaaaccaaagttacactggcattagagaataaggcaaaagaaaggatttccagagaattgtattcacatattacaaatgtctttccaatcatcctttaatgtttttcttacttagacaatgaccttctaaaataggcattttgtttcaaggttgtagtccaggttgcttaacacaggacaacaaaacctataaggctttgaacttgctattttataatcttcactcacaacaatttatatttagtgtattcccaacactctcaaaccagaggtagagtcagtacaaagcgtaataaaaaggtattttaaaattgctacacaggtacaaatatctggtttgatagaagaaataagacctagtgttcaatagatcagtaaggtgactatagtgtacagtaatctgtgttacataccagaatagctagaagagaataatttgaatgtttctcgcataaagaaaatacaaatatttaaggtgatagatatccgaagtacacttatttgatctttacaaagatcaaaactatgaggtacatgtgataatttactatgttcatataatgcatcagtaaaactattatgctaatcagtaaaaaatttgttttaaaaaaattactacaaagagtggaatatctgatgagtatctttctctatcataccttgaatttaaagaattttctttttaaaaaatatttaaataaacatttaattttatgatcattttagatttccagaaaagtcacaaaaataatagaatttcagcatactcctcacctggtttcctccattattaacatattaccagagtacatttgtcaaaaataagaaactgacatttaatacattgtcaattattaaccccagactttatttggagtttacttatttttccattaatgtcgtctctgccttccagaattcagtccaggggactacattgcatttagctgtcatgtctctccagtttcctggtctgtgatagtttcttagtttttccttctttttcatgaccttgacagtgttgggtagtactatacaggtattctgcagaatgtcgcccaatttgggtttgtctgatgattttctcatgattagatcagggttatggatttttagaaagagtatcacaaagaggaagtgtccttctcataacatcctatcatggggtgtataatagccacatgatgtcatggttgatattaaccttcatcacttggttagtgtttgctaggcttctccactgtgaagttagtgtttttccctttggaagtaagtcagtaaatctaactaccctcagatgagagagagcaggaattaacttcctcctccaggggatactaaaatatacataacataaaatttacattttaaccatttttaagtgtacagttcatattgttttataaccatcaccaccacccatctctagaactgtttcattgtctccactgaaaccctgcactcataaaacactaagtgtaaagggaattcttacattaaattgtttggcatagcatctggcaatgcagaaggcacacaataagtgtgaactattcataagtcgttttcagtgagacacttttagaaagatttttttccttcctttgtaggtaattaatcaacctccaaaagagattcagtaaaaataaaagtgatcatttaacctttccctcttgtaatggtcttttataaaaattcagttggggggccaggcacggtggctcattcctgtaatcccagctctttgggaggccaaggcagggggatcacctgaggtcaggagtttgagaccagcctggccaacatggtgaaaccccatcactactaaaaatggtggcgggcacctgtaatcccagctactctggaggctgaggctggagaatcacttgaacctgggaggcagaggctgcagtgagccaagatcccgccactgcactccagcctgggcatcagagtgagactctgtctaaaacaacaaaaaaaaaaacaaacaaaaaaattcagttgggaaggggaataaaaattactggctaaaatgggattttaggtcaggcatagtggctcatgcctgtaatcccagcacattgggaagctgaggccagaggattgcttgagcccaggagttcaagaccagcctggacaacatagcaaaatcacgtctctacaaagaaaatgtaaaaattagctgggcatggtggcacgagtgtgtagtcccagctacttgggaggctgaggtaggaggatagcatgagcctgggaggtcaaagctgcagtgagccacgatcatgccactgtactccagcctgggcaatagaatgggacccccatctcaaaaacaaaataaaatgggattttagcttatgtttggaaagggaagtaaacgtttttggctaaaatggtattttaattattctttttttttctgagacagagtcttgccctgtcacacaggctggagtgcaatggtgtgatctcggctcaatgcaacctccatctcctggcttcaatctattctcctgcctcagcctccccagccgctgggattacaggtgcctgccatcacgctcagctaatttttgtatttttattagagacagggtttcaccatgttggccaggctggtcttgaactcctgacctcgtgatccgcccgcccaaaatgctgggattacaggcgtgagccactgcagccggcctcttattctttatgatatgtttatcaccatgttttataaataattggttataattccatattcttatgtccgtaaacctttctgaatttttctaacatgtaaatgacttttttctagaagttaggaagtcatacagaataatgtattctggttgggtgcagtagctcatgcctataatcccaacactttgggaggccaggatcgcttgtggccaggaatttgagactagcctgggtaacatagtgagactctgattctacaaaaaaataaaaaattagctggtgtactggcacgcacttgtaatcttagctactcaggaggctgaggcaagaggattgcttgaacccagaagttgaaggctgcagtgagctacagctgtgccagcgcactccagcatggacaacagagagagaccctgtctcataaataaataaataacatattgtatatgttatagggtagaactgttaccattaagttgaagaatgtgaattttgaagtaaaaactcgtgcatctacagtttcatctgttgtttctactgcagaagaaatatttgccattgctaaggaattgctaaaaacagaaattgatgctgattttccacatcccttgagattaaggcttatgggtatgactttttcatttttttgtttttccttaaatctgctagattttcccaaataatcaactttgggaatacagggggcccccaacttaacaatggttcaacttaatgatttttcaactttgcgacagtgggaaagctgtatgctttcagtacactcttgacttacaaggtggttacatcccgataaacccatcataaattgaaagtattgtaaattgacttattatgttttcaatttacagcgggtttatctggatacaatcctactgtaactcaatgagcacctgtattctcgccttcattttatttcttaaacctgtttacgaagttcttcctttgctgctgccatttgtcttagttattagaccctgatgtgtgaagccatgatcattagtttaattccagtaagggtcaattaaagttgttattttccttataacttaatgaaattcttgtggccaggtgtgtttcaaaattcaaaacttttcagattttagaaagcaaattcagtgcatgtagagtatattacgttgtaatacttctttgtggatctggggcaacaccccctgttcaaacacattaatatttctgtagcaaaacaaaatattcagagactgtaaagactgatgacattaatttagtcatcaggtatcacttgttgcttacaattttcagaactttttggattttggaattacagataaaggattgtgacattgtgaaatcacatctccagccactacatggtaaaaagtaacaagccatgtttccaaagtgtactggttgaaagtatatatgtggatcaccactccaaatgcacattttactagtaaggagtgggtcactagccataattttatttatgaaagatatagcacacactgaaatcaactgaataaagtgttaattgaaagagccaggctgggcgcggtggctcacgcctgtaatctcaacactttgggaggccaaggcaggtggattgcctgaggtcaggagttcaagaccagcctggccaacatagtgaaactgcatctctacaaaaactacaaaaaattagctggacatggtggcgggcacctgtaatcccagctacttgagaggctgaggcaggagaatcgcttgaacccgggaagttgcagtgagctgagatcacgctgttgcactccagcctgggcaacaagagtgaaactccacctcagaaaaaaaaaaaaaaaaaaaaaaaaagcccaagagcagatatctatagaagcttaattcataattgccaaaactttgaagcaagcacgatgtccttcggtacgtgaatggataaataaactgtggtacatacagacagtggaataatattcagcacagaaaataaatgaattatcaattcatgaaaagacacgaatgaaacttaactgcataatgttaagtaaaagaagccagtctgaaaaagctaaatactgtgtgattccaaccatatgagattctggaaaaggcaaatatgagtaccataaaaaataattgattgtcaggagttaagaggggcaggaggtataaataggcaaaacacaggaattttagggcaatgaaatgattccgtatgattctataatgacacgtcattataaatttgtccagcgcccaggatgtattccaagggtgaaccctatgtaagctatggactttgagtgacaatgttgtggcagtgtaggtttatagattgtaacaaatgtaccactctagtgccacatgttgatagttggggtggtggaggggtgtgcatgtgtagggaaaggggatctttgggaactcattgtaccttctgctcaattttgctgtgaacctaaaattcctctaaaaaataaagtctattagaaaaaaaagagctaaagagtctgtatagttgactccagttagttactggtattaatttaatggtattatgtgtcacatatgaattaaaatcctacatcattatactaactccaaatagttaatatttaatgatattcttttataaaggaaggtaaatctgtacttataataccagctttgaaatgttacttatagtttctctctagccaaccttttgtatatgtcatagcactagacaaaatgtttttatgcattgtgagtgaattggctttgttcaatttgaaattgattgtgattggtttaatttaggtgttcggatatctagttttcccaatgaagaggacaggaaacaccaacaaaggagcattattggctttttacaggctggaaaccaagccctgtcagccactgagtgtacattagagaaaactgacaaagataagtttgtaaaacctctagaaatgtctcataagaagagtttctttgataaaaaacgatcagaaaggaaatggagtcaccaagatacatttaaatgtgaagccgtgaataaacaaagtttccagacatcacaaccattccaagttttaaagaagaagatgaatgagaatttggaaatatcagagaattcagatgactgtcagatacttacctgtcctgtttgctttagggctcaagggtgcatcagtctggaagccttgaataaacatgtagatgaatgtcttgatggaccttcaatcagtgaaaactttaaaatgttctcgtgttcacatgtttctgctaccaaagttaacaagaaagaaaatgttcctgcttcttcactttgtgagaagcaagattatgaagcccatccaaaaattaaagaaatatcttcagtagattgtatagctttagtagatactatagataactcatctaaagcagaaagcatagatgctttaagtaataagcatagcaaggaagaatgttctagtctcccaagcaagtcttttaatattgaacactgtcatcagaattcttcttctactgtttcattggaaaacgaagatgttggatcatttagacaagaataccgccagccttacttatgtgaagtgaaaacaggccaagctctagtttgtcctgtttgtaacgtagaacaaaagacttcagatctaaccctgttcaatgtgcatgtggatgtttgcttaaataaaagttttatccaagaattaagaaaggataaatttaacccagttaatcaacccaaagaaagctccagaagtactggtaagtgtgtaattgttttaaactgcatgattttctaggaatatgtattattaaaattaatgagattgttgttaaatctgaaacatatactattaaatgggtagtttgtgtatgccgccatttagggaaatgttggttacattgccataggttagaattaactcaagcctgtagattgtgaatttggggaaaactttggtttgatcttgatttagcacagaatgaactcaaaggtttaaggagctgagtgatctaatcaaacaaattccttcagagaacatctgtgaaggcacagtggtaaattaactataactgcataactagaaagcctctttaacttattttttggtagtgctgactctacccaaatttcaccaataaaattaagtgtaatgctaataaaattagtaaattacaaagaaattatagtttttggtgtgtttacatatgaactatatagtactaaggaagtttaatcaataagttttaactttttaaatttgtatacaactttttaattatttcatattattcattatggaatttcttgactttctttcctctaaaggtagctcaagtggagtacagaaggctgtaacaagaacaaaaaggtatggctaatttgagctttaataaagctggctacaatatgaaaattcaattattttataaattattaagtaatcaatattaaaaatgaattattttctagaatctcttcctgcattttaattgtgtgttccttttcattctaggccaggattgatgacaaagtactcaacatcaaagaaaataaaaccaaacaatcccaaacatacccttgatatattttttaagtaaacattgaacattttatcattaatttttaattgaaactagttattttataatcaatgaatttgttctttctgattttaagtttgcagatttatttagtgaaggcaagtgcaataatccttcctcagatgatgtttgcttttctaagatacatatactgattctgtgtatcttttttataaccatgagaattttacttccattatacatcaattggaaatcaatcctgttaagagataattcttaaaagggaaattaggaatgggataagaaggtgatttttttattatttttatactgaatataaaaacatttgtaagggctctcaaagattcacacatgcctatattatcataagaatttttcagcacttaactactttgttggcattgatcctagtgtctttaaatacttcatgagcattcataattaaaatttatcttaagttctatgaagagtattaatgtaactagcataagtggttttcttcaggaaaataaatatcacagtattatctgtgttaaaatggtttttgcctaaaatataatttttaatttggcttttcttatttaaaattccattatcttatgaataagcacttgaatcagtttttaaaatatttagtctaagatgattcaaagtagttttattttaatacaggacttttaaatggcagtatttcatttcttgtcaattatgttggtactttccacaaatctataaagaaggataaattgtaccatcattttattataatcctcaagagaaaatgtgtaattcaaaagattaatgtgtattaaaacacattatgtatcttagttacatttctatcagtacttttattaatatttgtgaaagaagacagcttaatagtagttagcttaagtagtttctccaagtacttttgtgctatcaatgagttcttctcaaaaaataattagttaggccaggcacaatggctcacacctgtaatgccagccctttgggaggccgaatgggcagatcacttgaggtcaggagtttgagaccagcctcgccaacatggtgagaccctgtctctactaaaacgataaaaaaaaaaaaaaaattagccaggcttggtggcacacgcctgtaatcccagctactcagatggctgaggcaggagaactacttgaacctgggaggtcaaagctgcagtcagccaagatcttgccactgtactccagcctgaagagcgagactctgtctcaataatataataatagttattatttaattgcaacatgaagttggaagccattttctgttacttctttaaggagctaaatcttttatatttttgttttctctccccttgcgtttcatattttagcttatgatctaaatatatattttgtatattataatattttaggaatagcttaattaagaactcacagactttgacaaagtggtaactagacttttaattactagattcttcaaattaggcttaatgcctgctagcatgccaatccaatcccatgactgatgttattatacactatggcaaatacaaagttgtagtattatggttcttgatggtgtgatttacttatgtaaattatgtacaaatttaagttcaatgaaacactgatttaatgtactgaaaggtaaatagtaccatagtgaattattttctgtcttgccttaggtttatttttattatcttcaatattagaataaatgctaaattattttcatttaaggatttatgtagttgaatattatcatttagtaatatttaatcatttgaaataaaatttaaagctttaattgatctaatagagatggttttctacttttccactcttcctccctcttatgccttcacttttgttttctgtgcccagaattttcttcacattctttactacctgttttgtctattatatccaacccattttctttttattataattttgatttggggcatttgaagaaaatacagcaaaactacaagaactggtaataagcatgcataatctcacctacttagtgaacctaatataaacctaatataaagaaccaccgtatttgcaatatatataactggtgaaaaactagtgtccagaatatataaatgatccctatgaatcagtaagaaaaagacagtcaatagaaatttggacaaaagactttatatggcatttcaagtgaaaggaaatccagatgaccaagaaacatgaaaatattcccagccatattaatatttgagaagtaaaaaataaaactacaaggaggtattacatctttaccttatttgcaaaaatgaaatgatctaatgatactaagttttggtgatgatgtcagctcttacattgaaaacaatcactgtggaaaaatttgtccctcagtaaatttaaagataaacatgctcaaaacctagcaattgcactctgaagtatacatctttgcaggttatctttcattacagttatttttttccctgtcaggaccctaactaatacaatgccttgggaaaactaatgaacatgtatcctaggaagcatgtacaagaaagttcttcccagtcaggaaggtggccaagaaaaaaattttttaatgttcatagcagcactgcaatatccaaaagttagaaatgaaccaaatattcagcaatggtagaatggttaaattgtaccatggcatttatattgaaacagtagaattctacacagtggtgaaaatgaaggaaatagctaaccacaacatagatgaatatcacagacatagcatagagcaaaagaagcaaatcacagaaggatgccatcaacatgattccatttgtataaagtttaaaacagtataaactgaacaactatattgttttaagggtatatagttatatatatgagatacaactgtaaagaaaagcaagtgttttgctgtccccagaaccagaataatgatttcctctgtggagaagtacagcagtgtgattggggagtggcacctggtgcttctgggatgctggcaatgttctatttcttgtcttgggtggtgattgcatggatgttcacttttaaaatactctttatacatatatattttatatattcttgttcatatataacctttataataaagagaaaaaaatggcaaaaa

SEQ ID NO: 1110 - DNA, 157 bp, Homo sapiens
atatttcttttttttgtttgtttttgagagggagtctcgctctgtcgcccaggctggagtgcagtggtgcgatctcggttcactgcaagctccgcctcctgggttctcgccattctcctgcctcagcttcccgagtagctgggactacaggcgcccg

SEQ ID NO: 1111 - DNA, 355 bp, Homo sapiens
gaaggtggaaggactacactggctaagtcttctggcctccgtctttctcctgtgctgcatgtcttctgcccttgaacatcagactccaagttcttcagcttttggactcttggacttccaccagtgatttgccagggactatcaggccttcagccacagactgaagggctgcaccatctgcttgtctgcttttgaggttttgggactcagactggcttcctggcttctcagcttgcagactgtgggacttcaccttgtgattgtgtgagtcaattttcctaagaaactccccttcatatatacatctattagttctgtccctctagaggaccctaatacaccaccaaacaagtca

SEQ ID NO: 1112 - DNA, 355 bp, Homo sapiens; identical to SEQ ID NO: 1111

SEQ ID NO: 1113 - DNA, 355 bp, Homo sapiens; identical to SEQ ID NO: 1111

SEQ ID NO: 1114 - DNA, 14103 bp, Homo sapiens
ttaatggtgtttcaatattatgttgtctaaaagtatgttaacttttttaaaaaattaaggttgacagatttgcaatggaattagaacaaagccgaaatttgagcaataccatagtgcacattgacatggatgctttctatgcagctgtagaaatgagggacaatccagaattgaaggataaacccattgctgtaggatcaatgagtatgctggtaagtaaagatcaaatacaaaaaggaaattttataacgtactcaagtaagctttactgtttcatgaagggggaattctttattgaggtctaccagtttgctgagtatttttctgggtgccttatatatgactcaattactgaatcctttcaacatactttaaggcaggggaccccaacccccagttcacagattggtattggtccatggtctgttaggaactgggcctcacaacaggaggtgagcgtcaggcaagcaaacgaagcttcgtctgtatttacaaccacttcccatcacttgcagtatgcccgagctctgtcagatcagttgtggcattagattctcataggagtgcaaactctattgtgaactgcacatgtgagggatccaggttacatactcattatgagaatcaaatgcctgatgatctatcactgtctcccatcacccccagatgggattctctaattgcaggaaaacaagcttagggctcccattgattctacattatggtgagttgtgtaattatttcattatatattacaatgtaattataataggaataaagtgcacaataaatgtgacgtgcttgaatcatctcaaaactatcaccccaccagtccgtggaaaaattgtcttccacgaaaccagtctctggtgccaaaaaggttaggaactgctgctttaaggtactagtttttatttccatttggcaaaaaagaaaactcagagagatgtttaataacttgcccaaagttacaaacctaataatttccatggcaaattaaatttttccataagtaaccgttctagttaaagagagttgaagaagaaagaaaaggaaatgttattctaaagtattaatagagattttcaaactgatctgcaggccaaatccagctttttattggaacaaagtcacacccatttatttattactattgttgcactaaaagagcagagttcaataattaagtgatctgcaaagcctaaaatgattactatctggacttccacagaaaagaaaaggtttgccaaccctagttctggaataacatacttcgttaatagagtacatttagaatgcagttaaattgtttttcccatgacttagaacttttgcttttctgattactgagttgctcttcctttttaccactctaaccttagaagaaccaggatagctatgtgtggctgaaagtgtgttggaaattaaaagtagcaactaaaatagatgagataatatttaaaaagtattagaaaaacaagaagagttcttccctgttcctaactccttcccatgccttagatagctacaaaactaattcttactgagtgattattttattataaaactataatctgtttgtttttttatctctgcctctgtgagtatgcaggcagctgataagtctgattccaaaacactgttttttgaaaggaaactcccctttcctacaaatcatcaataaatatttcaaaaaatatatttaattttattaagatataacaccataaatttatgtatgtttatgtatgtgtatacatacaaacttgctgtagccatgttaaagctaaaccaactgcttttgaaatctacaaaatattttctttcctacaatttctgtcctcctaaaaatcagttattgtttctaaattcaaaattattgttatatttaaacaaagattaccccttttgtatgttgaacaaatagttttcccttctactaagcataactttttgtcctattaaacatatgaaagtatatctacaaattaatgggagtgattgtttgattattcccactgataaaattcttttttggcgaatttgatggatttttgaaatgttctaacttggcactgagagttgcaactgagatcctacagcagttacctattgctgcataacagcctcccccagtatttagtggacagccaaaatttatttgctcatgattctgtaatttgagcagagtgcgatggcgatggctcaaccttgctctacctggagttggctagggcaatttaactgaggctaaaaaatccaaggtggcttcattcataggtctggcacttcgactgaggagattggaatggattccagcttcagaactttctcctctccattgttgcttcaacatttagtaatctaccccaaaatatttacaatggttgctggattacaaaaagcaaaagcctaggtttcagaactcagtgtcacttccttcacattatttttatcaaggcaagtcacgtggcatgaggaactagaacccacttttgataagagtaacttgtaaagtattgtggctgtgatctacaatataccacaaatctaaaagttagagaaattcttatttaaaagtttgtttgtcctctgctatagatctagcttttatgtcaattatattaaacttatttactaaaccattggttttgtttctagtgctatccacattttctgttccagaacactgaccaaggattagtatagttctgagtactatcaagatgttttaagtgccatttgaaaatcattagacgaaaattcatattattctgaaataatcccttcatttgtttctgttttgcatttctttgaaatttcacttgagattctaaataaggatttaatttgtgataaaatttgttttataaatagtactgtggtctaccacgttcacatagactttcatcagatatcatcaccaacaggatttaataagcaatattctcctttttactctcatacttttgtagttccatctcctagtcaaaatgttttcagcaaaaaagataattaagccttaagaaaaaccttaatttctaaacttattttaagctttaatcacttcattttggagacttaatttggctgaccacatagaccttttatttttgttctagatgaaaagtttccaaaatcccaaatagaccaaattcgaaaagtttactattatactatactattactttatataatgtaacatctatactaattgtactatactattattttatgactattctatacaacttaccatactattactttcatgtaacataactcactatcatccaaattttgatattcattctataataagtatgccttaaaaccaatgaagtttagttggtagaaatataagaaaatctttttattagcacagtcttgcttatacctggtatcacattataaatatagggatagtaatgggagagggtcatggtatcaaaataccgtgacagaataagtcaaaacttggattaaaacagtggcctataatcagagaaatgcaaatcaaaaccacaatgagataccatctcacaccagttagaatggcgatcattaaaaagtcaggaaacaacaggtgctggagaggatgtggagaaataggaacacttttacactgttggtaggactgtaaactagttcaaccattgtggaagttagtgtggcgattcctcagggatctagaactagaaacaccatttgacccagccatcccattactgggtatatacccaaaggattataaatcatgctgctgtaaagacacatgcacacatatgtttattgcggcactattcacaatagcaaagacttggaaccaacccaaatgtccaacaatgatagactggattaagaaaatgtggcacatatacaccatggaatactatgcagccataaaaaatgatgagttcatgtcctttttagggacatggatgaagctggaaaccatcgttctcagcaaactattgcaaggacaaaaaaccaaacaccacatgttctcactcatagatgagaattgaacaacgagaacacgtggacacaggaaggggaatatcacactctggggattgttgtgtggtggggggaagggggagggatagcattaggagatatacctaatattaaatgacgagttaatgggtgcagcacaccaacatggcacatgtatacatatgtaactaacttgcacgttgtgcacatgtaccttaaaacttaaagtataattaaaaaaatatatgatagaatgatgaccttgagtcattaataaaaaacaatgcttaatacattctatttttggaaaacaacaaaaacaaaaacaaaaaactggcctataaatgaaatgtccttgaattgaaaatgcacatattaatgtgtttcttatgaatgcattgatcaatatgtccatttaggtttgtgtatttttttccatgtggtcaattttctttcagtctacttcaaattaccatgcaaggagatttggtgttcgtgcagccatgccaggatttattgctaagaggctgtgcccacaacttataatagtgccccccaactttgacaaataccgagctgtgagtaaagaggtaagttaatgtctcacccctactttaggctttcactgagttcctgtcacctacagaatctcaagtccaagtgccttagcacgtaggatttggtcttagcttatcctttcagttgagcctcctatcacttcttcagcttgtatattgaatactgagctgcatatagcatccagaatacatcattctttttcccaattctttgcctttccatgcagttttcatttgcttagaaaacttcccatttcctcaaactttgaactgccttaatgataatataaaattaaatttagctattttttcttaatgtacaatatacattttttctagaaccacattttatttataacttacagaatctactcatcattaatttcaacctattgtctgaataattacttattaatgttgttaaacagtgacaaaattcatgtattttgattagcctactttacttgccccataatcatttgctgtctaagagactgataattgaaaagggagtaatccattgcttcaaaaaggatctttgaagtagatttgattatttactaaaattgccaaactgtcatatgtgaaaaccgccattttttctattttttatgacaactggtctatcatgcagtgctggaatttaatttttgaattaaaattttagactactacatcaaatacttttagactgctatagtaaaatgtgtttaagactgctgcctgaatggaaacacttaaaaaaactgtgacctaatacttattactctttagttataccaggggtctttaaattcacccctcttatttgtattccacctcattttccctagaagtgacactattccaagtttaaacacaggtttgtttgttttttttctgtccaaggcagtctgtgacagcaagtgctttttgcatacctctgaaaaggtggtggaggagaggggagcacacttacatttggttactgcttatctctttcattgtattcctaattaaaaagagataaaatactaatcataaatatagccttttaagaagttttaaaaatcctacaaaagtttagtaagaaaaggtattttttaaagtcgtactttaactcagcaaaacttctggcagtatgccagtgaaaaccaaagtgtttttagttattttagtctggttatttatgtaagtcagagaactcttcaaatttgagccggatctagctagtttatatgcagataacaaatgagttcttctgtgtaaatgaactgtagaacaaattcatcactgcctatggatacataaatattcatgacttggttagaaaatttaagaaaaagccctcccgttttttttgacacagggtctcaccccatagcccaggctggagtgccgtgactcgatcatacctcactataaccttaaactcttgagttaagcaatcctctggcctcagcctcctgagtagctagattgacaggcatgcatcaccacacccacctaattttaaaatttttttgcagagatagggttttcctatgttgctcaggctaggcttaaactcctggcctcaaaaaattatcctgcccaggcctcccaaagtgctgggattacaggcatgagccatcatgcccagttagccatttttgttttatccaaaatattggagctttaagtgcttgatttttactggaacgtctcttttaattcttacagcaatatcctatgtaaaggaagttaataaatactcaacagtgtctctagggagtacttctcattcagaatcttagttggctgccagttacagacttcacagagtttcattttcattggaaagattctatttgagcacattataacaagaacaaagctaattaaggcactctctgagtaaaacttggccaagtttatatcaccattttctaaaattccctttgactcagctgttcataattatattaagctaaaaacctttgtttttataaaagaagaaacagttttctcatgatacagtagacagttttaaaagctaaatggaagcttaacgtaattcagcaaatatgttttctaatataaattttttttgaggcagggtctcactctgtcacccaagctggaaaatatgcatattattttgacaaccattgcctctaattatagctaatacttaagtggttagaaaaaaaagtcatagttttatgtagtaacactatgttatataaaaggcatttctgaattaaaagccactataattctaatctttatatgtatttcttttatcctaagatgttactccagacttttccccatcatttaaggtaatcatggagtacactatagattgtcatttttttccattccagatcttaataagtaataggaaatagaaaacattccttttcctgtatggattaatgcattaattaatgttaagtggacttttatgtgcatgttataattaattggaatattttctaaagcaacatagtacctttatataagattattcctttttaaaatgaaccaaaaacaataaatcacaaaaggcaggagggaatagaatcctatcattcccacttcagcttctgacgagctacctaaaaccttaaccatttttttgtatgggcctaccagataatgttttctgagatttatttgaattgcttattataactagatataggtagctaaatagagattgtatcaaatgaagctattttatggtcttctgccttcatggtctattttaatacaaaaggaaattttgaaaatattccctggtagtggattatttattccttaaatccatgaactattgactgcaggattgttactgtagttgcaaactaagaatattaacatttcttatcagctacatatgacagaagaagtttgctatcacagcaaaatttaaacttttttttgtttcctttgaaggttaaggaaatacttgctgattatgatcccaattttatggccatgagtcttgatgaagcctacttgaatataacaaagcacttagaagaaagacaaaattggcctgaggataaaagaaggtatttcatcaaaatgggaagctctgtagaaaatggtaagcaacttattaagactatcaaaccaagaagcagtgaaaaaaaaaaacccacaactctttgaattaatccaattaatttattagcctgcataggtagaagggatagatatgtacctttataaaaatgtaaaatcagaaaattttaaaaataccagtgggttttctgagttaaacatgtggaatatcacatataaacaaaatgtgattgttaaatctctgagcttaagagtctgcagagtccctgaacaaagtaattttatagcagttattttcctaaggtctaactaacaaagagtttggatggcattgaagctgaggaagttgtctgtttaaagcggccttttcttgttgttagaaaagactagcctcaaacatatcaaaacattggatgattctatttttcttcattttcctaattttctataatctaattattatagcaattatgactgtttttagctctgccaaaattaatgacttcccactcccttctttgccttagactttataatttcaagactccagggtttttttaaaaaaataatccctttatgacctatccaaaagcaatgccaagaaacatgcagatattacacatactgctttcaacattttgtcaaaggtatgattatgtctgagatgtcctggacccctgaacaaagttcacctggatgaaaaagtgacacagaagggtttgctcacaacccacaggaacatttcatgtgcaccactcattgcttcagacgggccaggcagtgctggggagacctgtttgtaactttccctgaagcaaaaatggtagatccacaatgacattaatctaactctctcacattatttgtgactcacatcatttgatgcaagtttaatatgggcatcaaatacaacttcattaccttatttaaagtgctaagggatagctctctctttttttttataggagcattaaacaataatcatcatttctcgacacaggcacagagcaaaaggttttccttatttggtgtaactttattgtttgaggatgtggaacataaagcctgatgtcactttgtataaaatcttactttattaattccttactttcacaagagaatgggggaaaatcattaaataattatgtcaaagcatcccctgagggcctcccataacaattacttgcatgatgtgttttaaaagctttacattgggattaaagtaaatgttttcattttctactaatttttttcttttttttgagatagggtctcactgtgttgcccaggctggagtgcagtggtgcagtctcagctcactgcaacctccgcctcctgggttcaagcagttctcctgccttagactcccaagtatctgggattagaggcgcgtgccaccacacccgactaattttttgtatttttagtagaggtggggtttcaccatgttggccaggctggtctcaaactcctgacctcaggtgatctgcccgcctcggccttccaaagtgctgggattacaggcatgagccaccacgcccagcctactaatgttcttttcatttattataatgtccaaactcactatgaatatgtgaatttttaatatctattgcttttaacatatttacttgtatattgccctcttcgtgtattttcatattcttaaacaattggaatagttaaacttttcttctcatgtgtaaatacctgtgggctggactttcaggcgtgtctcacctcacatcatgccatgggaaattgtcaatagtgcattggaactgtggaaggcaattgatatatcttcctctaaagtccaagacattgttttgctgtttccccattttctaaaaggtgtttgtctttggaaatatattgctaactaccatctctacatacaaataaaataataattttttaaatgtttactctcccatgtaaatctggatggtgagtgccagataatataagaaactgaaataccatacactttttagcacttgtcttccaaatgaaatgctttaatcctagtgttacattctgattaccttagttatggggattataaagatgtttctgtcacaaagcaaataagaaactacttcagctcttagttacacagccaggcctcacaaaaaagtagaaagtagttcagattgaaaaggtacctgaacattctgcagcagctctgataatgtgtgagaaggcagcattcttcacttcctgctgtatagttctgctctcacagtggctcacctgagggcagggtggtagaggcatgaggtacaaaacatggcataaaaaactctgcagaacgggtttatgaatgtggcagataacttacttggtttgcagtttttctgtagctttctttaccgtgacttctacccatccagatggggaaaagggctccaggtagataccatttcaattgtttcacagtctttattttttttttatttttttttatttttttgagatggagtctcactctgtcaccaaggctggagtacagtggcacaatctcagctcactgcaacctctgcctcctgggttgaagtaattctcctgccccagcctccggagtagctgtgcgccaccattcctggctcatttttgtatttttagtagagatggggtttcaccatgttagccaggctggtctcgaactcctgacctcaggtgatcctcccacctcagcttcccaaagtgctgggattacagacgtgagccaccttgcctggcctgtttcccctctgaattgttctacattttaaaaccagcatattaaaaaatgacaggaactgaagcacataaatatcagctaatgtaagtttgaaaataaggcttattggcgaggcaaggtggttcacatttataatcctagcactttaggaggctgaggtgggaggatcagttgaggccaggagtttgagaccaccctgggcaagattgtgaaaccctatatttaccaaaaaattataaaattagctaagcgtgatggctcgcgcctgtagtcctagctatactccagcctgggcaagagggagaccctgtcttaaaaaaaaaaaaaaaaaaagagagaaagaaaataagcttattgtgtatgtgccctgggaattcagatttggaaaacatctgactgaattaacatctatgacttacttcacactacatattttaaatttttaaattaatcagatgtctgtcatatttattttatattatctttaaaattttttcctaaacagccaaatacatttttcaagtaatatacattcgtatgcatcttaaaactagaaatttaattttttcttctgtattgaccttaatttggaaaatatttatatgtaataaaattacgagatgggatcagaaagctttgttgctaaccttggttgttataaatacatttaaattgtatttcttctacattaagccaagaaaacaggctttaatagatttgttcatggagacatttttagtatcagtatagatttaagaatattttacagtccatttatgaaaaatataaatataaagaggcaataaccagactggtatttttactttactttgtaataatagtttatagcctattaataataacgtctctttttcttaaacttggattatccaatcagaccttcagaatttgtatattcaaagaagcataactttcacaggtaatttctatttattacaaatgtgcccttagtcaaagtgatactttataaacaagcaaatcaaaattaaaatcagcatttgaaagaagaaaattcagattattttaacatctaaaaggtttcttccataaatgaagaaaagttaagtgtttttccttctaaaaacaaaacttattttcagtataattattatatattgtttattatattctaaattctaattttcgaagattctttttcttcctaaagaagaataaagaaaagatttcctttttttttttttaagaaaaaggtaatgtgaactgaaacctaattctgaatttcaattaatttaggtacgaacattagtgagttttacataagatatttccttttaatatttatactgtggaaatggataatagtctttttaagaaaaattcataatcagtgttctctttaatggttataaaacattaaatgataaatgatggcatttctgatcttggatcctagaaactaaactaaactagatttttgtttttgtcttcagaaataatgtagggaaacctaacttatgaagtatatacttcttaaaataaaggtgagttattttcctgtttatgacttagataatccaggaaaggaagttaataaactgagtgagcatgaacgatccatctctccactactttttgaagagagtccttctgatgtgcagcccccaggagatcctttccaagtgaactttgaagaacaaaacaatcctcaaatactccaaaactcagttgtttttggaacatcagcccaggaagtggtaaaggaaattcgtttcagaattgagcagaaaacaacactgacagccagtgcaggtatttaaaagagtattgatggccactgtagttataattttcagactggctaatttaagtgtaatattagtagtttctcattataaagtatatagtaacattttacttacttagtctttcattcaacttctaacaactttacctattcagaatagctgtgaacctagtaagtaaattggaattaagcagactatgagcctgaaggaaaaaaaagattatacgtttctttctttttttttttttttgagatggagtcttgctctgttgcccaggttggagtgcagtggggcgatctcattcagcttactgcaacctctgcctcctgggttcaagcgattctcctgcctcagcctcccaagtaggtgggactacaggcgcatgccaccatgcccagctaattttttgtattttcagtagtgacggtgtttcaccatgttagccaggatggtctccatatcctgacctcatgatccgcccaccttggcctcccaaagtgctgggattacaggcctgagccaccgcgcccgactcataaatttcatatagctatctttttctagcacaaaatatatttttattggttttgcatgtaataacttgagtattagtttttccttgggagacttcaatcctgtccaagattacattgcaggagagaacccagacggccacaaggtaagagacaaaagaaatactaactagcaacatagcaatccagaacaatctggtaaaaggaaaaacaaatttacatatgttgataacccatgaggccatcactgtctcttaacataataactgttattcatcatgaggaccctgaactatcttgtaaaagccatattgtgattaggtaaatcttttctttctacaccaaagcatgagaatgaataatgcattttaggaagatctatataacaattaaaatgaactgtttaatgaatatatttgaatatagctatttcaaattatcttaattaggactcctagaaattgtgaaacatctttttgaaaaatagtaatttgttttgtgaataacataaaaaggatacaccatctaattatcattattttaaatatactgtaaccagaatctttgattttttgctttatgtggataatctacgcaaaagacattttcaaagagtaaacatccaccctaaattatattctgtatcttttcttagagatagatatagaaccactataaaaacaatctgggctgggcatgatggctcacgcctgtaatcccagcactttgggaggccgaagctcgtggactacctgaggtcaggagttcgagaccagcctgaccaatatggtgaaacccccatctctactaaaaatacaaaaattagccaggcatggtgttgcgtgcctctaatcccagctactcgggaggctgagacaggagaatcgcttgaacccaggaggcggaggttgcagtgagccaagatcacgccattgcactccagcctgggcgacagagcaagactccatctgaaaaaaaaaaaaaaaaatctgtattcctactaaaggtagtaagtaagctaatagtaacacttaatattgcttagctcagaaattactcttacattttaaaatgtcatggagaattaaatatttctcatttttgctgccacaatgactgtaactagtacaatttattttcctaaaaccatagcaaaccctggggagatagatggtaatcaaatgttatttttaaagtagcattatatatcatttgagattttttgcaattaactttttttttctgttttgttattgcatatttaaaagtcatacatatcaacttctttgagtcatcagagtattcttcttttaaggcattgccccaaatacaatgttagcaaaagtatgcagtgataagaataaaccaaatggacaataccaaattcttcccaatagacaagctgt

SEQ ID NO: 1115 - DNA, 438 bp, Homo sapiens
ttctgttttggaaataatataaatatatctttattttagactttttgctgaaaagtttcttaaatatttacaactttaggataatcagtgtacatttcaatatataatgtcctaaaaatcaaacagctaccaaacattgaattgaagttctgacttatataaatcatttgcataaaaactgatcattaaaaacagtatctaatgaacattttggccccaatattaattaaaactgaaatgatagcattacaagctaaagattaatttcaatgacatgtcgttcaaccattttgacataatcgacttataataagctaaaattgactatttttatgacatatttgacctaaatgaagagaaaaaagctttgactaattcttaattactctttctgaccaattgatggccaataactgaatttaatttcaaaccattttc

SEQ ID NO: 1116 - DNA, 1481 bp, Homo sapiens
ttctgttttggaaataatataaatatatctttattttagactttttgctgtaaagtttcttaaatatttacaactttaggataatcagtgtacatttcaatatataatgtcctaaaaatcaaacagctaccaaacattgaattgaagttctgacttatataaatcatttgcataaaaactgatcattaaaaacagtatctaatgaacattttggccccaatattaattaaaactgaaatgatagcattacaagctaaagattaatttcaatgacatgtcattcaaccattttgacataattgacttataataatctaaaattgactatttttatgacatatttgacctaaatgaagagaaaaaagctttgactcattcttaattactctttctaaccaattgatggccaataactgaaattaatttcaaaccattttttgttattttaatcttttaaacatgttttactttcagtgattcattttctaacattcatagccaaagcccaggctctacccatctttgtctaccttaatgactttgtcaattgttggcatacactgggtcttaaaaacttgtgtttcttccgaattaattaatgaagtagaattgctcttatagggtttcatataccattacctccaaaagagtacatcagaagtattagaaaatactgatatttataaacagatatttatcttatgatacaaagagctagagctgttttattttctgtaaaactaagaataacttcttgataacgtagctttacaaaaagaaaacccaacacatttccataaataattctctgaaataactatgtgagtttgtgtctttttatatacatgtagatatacatatacttacacatctatacatatatatgtaacataaaggatatgaacattaggactgtttaatgtctatttgtcttggaaagaaaaatatacttaaaaatatttcttaattgggatttgtaatcgtaccaacttaattgataaacttggcaactgcttttatgttctgtctccttccataaatttttcaaaatactaattcaacaaagaaaaagctctaattttcattggaaataatttatatacttgtttagagcagagaaaaattaagaaaaactttgaaatggtctcaaaaaattgctaaatattttcaatggaaaactaaatgttagtttagctgattgtatggggtttctgaacctttcactttttgtttgttttacctatttcacaactgtgtaaattgccaataattcctgtccatgaaaatgcaaattatccagtgtagatatatttgaccatcaccctatggatattggctagttttgcctttattaagcaaattcatttcagcctgaatgtctgcctatatattctctgctctttgtattctcctttgaacccgttaaaacatcctgtggcactcttatttattaatcagttaaataaaatcatgaacatata

SEQ ID NO: 1117 - DNA, 438 bp, Homo sapiens
ttgtgttgtggaaataatataaatatatctttattttagactttttgctgaagagttttttaaatatttacaactttaggataatcagtgtacatttcaatatataatgtcctaaaaatcacacagctcccaaacattgaattgaagttctgacttatataaatcatttgcataaaaactgatcattaaaaacagtatctaatgaacattttggccccaatattaattaaaactgaaatgatagcattacaagctaaagattaatttcaatgacatgtcgttcaaccattttgacataatcgacttataataagctaaaattgactatttttatgacatatttgacctaaatgaagagaaaaaagctttgactaattcttaattactctttctgaccaattgatggccaataactgaatttaatttcaaaccattttc

SEQ ID NO: 1118 - DNA, 115 bp, Homo sapiens
tttttgtatttttagtagagacggggtttcaccatgttggccaggctgatctcgaactcctgacctcgtgatccacccgccttagcctcccaaagtgctgggattacaggcgtga

SEQ ID NO: 1119 - DNA, 297 bp, Homo sapiens
agttttttgttttttttgttttttttgagacggagtctcgctttgtcgcccaggttggagtgcaatggcgcgatctcggctcactgcaagctccgcctcccgggttcacgccattctcctgcatcagcctccctagtagctgggactacaggcccctgccaccacgcctggctaatttttttttttttgtatttttagtagagacggggtttcaccgtgttagctaggatggtctcaatctcctgatctcgtgatccgcccgtctcggcctcccacagtgctgggattacaggcgtg

SEQ ID NO: 1120 - DNA, 642 bp, Homo sapiens
tgctattatgtttaatattgatttgataaaaaaatggaattaggtgtagcttagagtataaatgagtctttttaaaaatgtgtatctggaagtagggctaataaagaaatccttttattttcaaagaaatgaacttaattggacaactcatccccaattacagaattgatatcaatatggtttgctgtatttgagtataaacagctcagtgttaattatatcaaaggaagttctttacatcttcattgattacaaaatttaccaaagaaaatgtatctaccaaatataatttttaaagtacttgttaaggaatgaggcctctttaacatataaagtatcttaaaaatattctctgacctggaaaataggtttacagtagctacaagattccattttaggttttcttatgtcaataaatgtcaatattttacacttccagcaaaagtacccgttaaagctaaatctaaatattattcctcatagcacagtttctggtctccttaaattaaggatcctactcatcaggattgaataaaaagggggaaattcctaaaattggtatattgtataatattgtgggttaagtaaaatttaggggggcattatggaaatgtacctattttaaagggcagtggcaattac

SEQ ID NO: 1121 - DNA, 404 bp, Homo sapiens
taaaactgttaacaatgctaataaaattatgagtcatcagattggtacagttttccctgccaagatggtcatattgataatgtaagacaaattttagtattacttgcattatgtgtacctaataggtatatcatactggtactgagcatatatagaaaatactattcatagaggagtcatcaccacccaacctccttgcctgtgtaggcatatttcttctgaacctgaccacacaagtacaacattttggtaacttcagtcttttcagtatttttgtaatcttagccatagtcctatgagaaatgtacataagagcaaacaattcaggatagaaattagcagaaagctgggaatgatgtgaaataactggcagcatagtacagaaatgtaaggtatatgttttg

SEQ ID NO: 1122 - DNA, 310 bp, Homo sapiens
gatcattctgagtgttttttttctttgcagaaaaacaggattgggttaagaaaagctaaaatactcatttttttaaaatgtatagcccaataagaactaaatgatttatttcaaaagttaaataattttttttggaaatcatggaatgtatttgcatattgatgttccaaacaggttttatgtattgttttttatagcagggagtagttgaaaagtaatgagtatattgattagctgtcttggaaagagaggattggctttctaacaatcactgatacaggtttgggtttgggggggtttgtttgtttgt

SEQ ID NO: 1123 - DNA, 435 bp, Homo sapiens
atttatgctttcatagaatttagattctaatggcagggggtgtgggtggcagattagtgagttaaatatgctacgggttagtgataaatgctagggtgtaagagtgtgtgtgcacacatgtgcatgcacgcacatatgtggaggctgaagacaatgcttgctcctgccccatccccaccacagacctcgtagcaactggttcccaaactttatttatcataaaagtcattgaccttgaatcacaatgggctgggtccctgcactacacaacatctgaatgtgaatgtgagtcttagattatagataattttccatacttaaaaagttatgagcatatggaaaaagcagtaacagtatacacaatttcatttctcagatgtacatctcttctcatgagttttcgtcctgaaaatacagagagatattagtactatc

SEQ ID NO: 1124 - DNA, 1154 bp, Homo sapiens
atttatgctttcatagaatttagattctaatggcagggggtgtgggtggcagattagtgagttaaatatgctacgggttagtgataaatgctagggtgtaagagtgtgtgtgcacacatgtgcatgcacgcacatatgtggaggctgaagacaatgcttgctcctgccccatccccaccacagacctcgtagcaactggttcccaaactttatttatcataaaagtcattgaccttgaatcacaatgggctgggtccctgcactacacaacatctgaatgtgaatgtgagtcttagattatagataattttccatacttaaaaagttatgagcatatggaaaaagcagtaacagtatacacaatttcatttctcagatgtacatctcttctcatgagttttcgtcctgaaaatacagagagatattagtactatcttgttcattatctggagagtccttgccaaaatattgcacacagttccactgattgagcatttctagggttctcagatgacttatataaataagcagctgctggtagccattgtcagctcattgtcttctttgagtctcattgtcttgttttaggcttagaccatctgccaaaaacaaacccaagggaatagtagtaagttgaagatatcaggttgaaggtatcaggccctagatgtgcatgaatgaaaaactaagagagaacttatttcttatttccgcccctgtcataacagggacaacagagatctatttacaagataggtttttcatggtgttaaggttttgtggtgttcaaagataggaaaaggaagttgaggcagtgcagtatatgctgtttgtctcattaggttattaactatttgaggttagggataatgcttttccttaattgacaatgtcatgctctatataatgtcattatttaatatgactgatggaaatataaaatataaaggtacactatgactcactgaatctaagtttcacagttttaatattttagcatttctaaaattggatagaggtcttacaatatatcgtctttggccaggcatggtgggtcatgctgtaatctcagcactttgggaggctaagacaggaggatggcttgaggcaggagctcgagactagcctggtcaatacagtgagaccttgtctct

SEQ ID NO: 1125 - DNA, 1157 bp, Homo sapiens
atttatgctttcatagaatttagattctaatggcagggggtgtgggtggcagattagtgagttaaatatgctacgggttagtgataaatgctagggtgtaagagtgtgtgtgcacacatgtgcatgcacgcacatatgtggaggctgaagacaatgcttgctcctgccccatccccaccacagacctcgtagcaactggttcccaaactttatttatcataaaagtcattgaccttgaatcacaatgggctgggtccctgcactacacaacatctgaatgtgaatgtgagtcttagattatagataattttccatacttaaaaagttatgagcatatggaaaaagcagtaacagtatacacaatttcatttctcagatgtacatctcttctcatgagttttcgtcctgaaaatacagagagatattagtactatcttgttcattatctggagagtccttgccaaaatattgcacacagttccactgattgagcatttctagggttctcagatgacttatataaataagcagctgctggtagccattgtcagctcattgtcttctttgagtctcattgtcttgttttaggcttagaccatctgccaaaaacaaacccaagggaatagtagtaagttgaagatatcaggttgaaggtatcaggccctagatgtgcatgaatgaaaaactaagagagaacttatttcttatttcccccctgtcataacagggacaacagagatctatttacaagataggtttttcatggtgttaaggtctttgtcggtgttcaaagataggaaaaggaagttgaggcagtgcagtatatgctgtttgtctcattaggttattaactatttgaggttagggataatgcttttccttaattgacaatgtcatgctctatataatgtcattatttaatatgactgatggaaatataaaatataaaggtacactatgactcactgaatctaagtttcacagttttaatattttagcatttctaaaattggatagaggtcttacaatatatcgtctttggccaggcatggtgggtcatgcctgtaatctcagcactttgggaggctaagacaggaggatggcttgaggccaggagctcgagactagcctggtcaatacagtgagaccttgtctct

SEQ ID NO: 1126 - DNA, 613 bp, Homo sapiens
gaggaacattaaagaaatctttctcaatttggaattaaggccctgagcaatgacctagaaatcagacatacttgaaatatttagtagggaaatgaagatcttttatgtcaggtgcttactttatgattctcagaaaccaactggtactttaaggaaccttgcgttcaggccactcctaattatcttctttctccttgctgagttctattccatacttgtagaaaataaacttctgggaaaacttaattttagtctttgattacatgattcaggttagctttaaggaacattgtttaatattgaaatgtataagtagaaaacattaatttctttatagatgtatttttaaaaagaatgctgtttttgtttgtgatgctttagttccagtataatgctttctacacattcctttaaaatcactcctcaagggagaacagaggcaacccataccccattctaaactcctacccctcttgcccaataagagtaatcactacgtagctttattctgttaatgacgagccaaaatttcattaaagtatattttttactttattctgtaatttatttgtatttgttttcacatgaaagtaataataaaaaagtgctgtgc

SEQ ID NO: 1127 - DNA, 613 bp, Homo sapiens; identical to SEQ ID NO: 1126

SEQ ID NO: 1128 - DNA, 613 bp, Homo sapiens; identical to SEQ ID NO: 1126

SEQ ID NO: 1129 - DNA, 924 bp, Homo sapiens
tgtctaaccagaactctctgtttcatgtgtgttctctcactagctgccaagacaacatttttatttgtgatgtctatgaggaaatcccatatcattaagtgccagtgtcctgcattgagtttgtggttaattaaatgagctcttctgctgatggaccctggagcaatttctcccctcacctgacattcaaggtggtcacctgccctagtagttggagctcagtagctgaatttctgaaaccaaatctgtgtcttcataaaataaggtgcaaaaaaaaaaaataccagttaagtaaagcctcaactgggtttttgtttctatgaaaatatcattataatcactatttatttcctaagttgaacctgaatagaaagggaaaccattcttattaagctttttattaggccctgtggctaaatgtgtacatttatattagaatgtactgtacagtccagatcttttctttaattcttattggttttttttttttttttttttttagagatggagtcttgctatattcgcaaggctgatcttgaagtcctgggctcaagtgatcctcccacctcagcctcctgagtggttggggttacgggcgtgagccactgtgcctggttccagctctcctcttaaatagtgggtatagtctgcacaacaggaaccatggcaggaatatacactttcccatagcaaatagcatacctgactctctgtgctaatattgcacatttgttaaacaatgaatgaatggatggatggatggatggatgaatgaatgaaacatatactactgattattttattccagagttctcaaaatatttgttgctgatattttgagtgctgactgtaattactttgattagataaacaactggaaataatgctgctgaaaaagttctaataaatgtgtattttatcaga

SEQ ID NO: 1130 - DNA, 925 bp, Homo sapiens
tgtctaaccagaactctctgtttcatgtgtgttctctcactagctgccaagacaacatttttatttgtgatgtctatgaggaaatcccatatcattaagtgccagtgtcctgcattgagtttgtggttaattaaatgagctcttctgctgatggaccctggagcaatttctcccctcacctgacattcaaggtggtcacctgccctagtagttggagctcagtagctgaatttctgaaaccaaatctgtgtcttcataaaataaggtgcaaaaaaaaaaaataccagttaagtaaagcctcaactgggtttttgtttctatgaaaatatcattataatcactatttatttcctaagttgaacctgaatagaaagggaaaccattcttattaagctttttattaggccctgtggctaaatgtgtacatttatattagaatgtactgtacagtccagatcttttctttaattcttattggttttttttttttttttttttttagagatggagtcttgctatattgccaaggctgatcttgaagtcctgggctcaagtgatcctcccacctcagcctcctgagtggttggggttacgggcgtgagccactgtgcctggcttccagctctcctcttaaatagtgggtatagtctgcacaacaggaaccatggcaggaatatacactttcccatagcaaatagcatacctgactctctgtgctaatattgcacatttgttaaacaatgaatgaatggatggatggatggatggatgaatgaatgaaacatatactactgattattttattccagagttctcaaaatatttgttgctgatattttgagtgctgactgtaattactttgattagataaacaactggaaataatgctgctgaaaaagttctaataaatgtgtattttatcaga

SEQ ID NO: 1131 - DNA, 1037 bp, Homo sapiens
aggtgacaaaatggaatctcttcaaacgaaaatctaaacaaactaccaactttgaaaatccaatctatgcacaggtaatttttaacaatttttcttagcacagacattttttcttagaaattatttgcttggttaaattggacacacacttagattattctgagcagagtggccacaaatagtcttctttatgaaaaaccgtgtatggtgaccttgggggaataaatggctgattcctgttacattgtattcttagatggagaacgagcaaaaggaaagtgttgctgcgacaccacctccatcaccttcgctccctgctaagcctaagcctccttcgagaagagacccaactccaacctattctgcaacagaagacacttttaaagacaccgcaaatcttgttaaagaagactctgaagtatagctataccagctatttagggaataattagaaacacacttttgcacatatattttttacaaacagatgaaaaaagttaacattcagtactttatgaaaaaaatatatttttccctgtttgcctatagttggaggtatcctgtgtgtctttttttacttatgccgtctcatatttttacaaataattatcacaatgtactatatgtatatctttgcactgaagttgtctgaaggtaatactataaatatattgtatatttgtaaattttggaaagattatcctgttactgaatttgctaataaagatgtctgctgatttggttggtgatcattatagtaaatgatccaacaagaaaaggaattgactggggacctttagccgtgtctaaagaagaggcaccactcatatttcctataaaattatctaggaaaggaatccaggccccgctcttgggtccatttttacacattagcacttaattaatgttcaatattacatgtcaatttgattaatggctatgttgataggggccactatgtgttgtatagacatctggacttgactgtagactcctcagataatacagaaggtaggaaaagcaattcagtttggccc

SEQ ID NO: 1132 - DNA, 32249 bp, Homo sapiens
gaattctgtcaatgagctggccttccttataaaaggatttacattttctgcttaagaggtattatttatagtttgaaatatttctggtgatatttgcgggtgggatcatatgtgcttcattgtgcattttataaagaacaacaaattcacgggaagatgtgccttttgatgttgttgctttgcaaattttgctgagaagagtcgttgatatttcctgttgtttagaaggaatcggcacatttattagaaattggtgattgctcttcttgatggaaaagtgactcagaatatagttaaaaggttaatgggcagaacttccatggcgcttcttagggagcatttaatgtagaagctgttgcaagtgctattgtggaggggtcaatgtgaacggtggctgcatccatcttttacttcttctgggattatctttcttcaggtccaaatggtgccgagtgccagtgtccacatgagggcaactggtatttggccaacaacaggaagcactgcattgtggacaatggtgaacgatgtggtgcatcttccttcacctgctccaatgggcgctgcatctcggaagagtggaagtgtgataatgacaacgactgtggggatggcagtgatgagatggaaagtgtctgtggtgagttggactcttggcgcttttggtaggagctaatggcatcttgatgtcaagtgtttggtatggaatcctgctatgtgtgaatgtgtttgaaatgtgtgcctaggcatcctggtagagctgaaaaatgtttcctctgataatccagactgtttctgttaaatcacctctgtagtggttaagagcacaagcacaatcatcatcctggtgatcgcatttgtaatctgtatagacctgggaaagttacttaatatctcaagcctcagacatctcatctgtaaaatggagctactactagggttcttgcgaggagtaagagaaacaatatgtaaaaatcccttagcatgaggcatggtgcaagctaagtctagcttagcttgggactaaggaaacgtatcattttaccaattttcgtagcacaaaggtcattatttcaaaaattttatgaaaataacttccaatcctcagcttccatctgaatagagtgaataaaacacagtggactttctcagggagttctgaggttggttaccttttcctagcagactgtgataggggctaggagtttttattttcctgaaataaactataattgcatgctttttgtgattgagataaattgagattatagagaaacagaatgactttgatttgtgcttaaattacttgatttgtgcctaaaacaattttaaaaatgtatacaacatattttgcttaatctaactaattaaaagtgttatctcactttgcatgcagtccattttgcagcgttttttgccttggaaggtaaattcaaagtgtctcttttatttaattgtatctttttaaaaattaggataatgttttaatcaagagggtttgttctcatgtttttcctgttcttagcacttcacacctgctcaccgacagccttcacctgtgccaatgggcgatgtgtccaatactcttaccgctgtgattactacaatgactgtggtgatggcagtgatgaggcagggtgcctgttcagggactgcaatgccaccacggagtttatgtgcaataacagaaggtgcatacctcgtgagtttatctgcaatggtgtagacaactgccatgataataacacttcagatgagaaaaattgccgtaagtttatcttaagtgcttattgtgattttgggtctgaagtcttggatcacaggagatgaaattattatataaaaaaaaggctttccaaaaataaaaaccctaagtatttatctaaaacgtaaatttttggctaggcgcggtagcaagtatcaacaaataccaatcttgtttcatttttctctccttttttctagtattttaaagtgactcctagtcatgcacttcactgataacattttggaaaataactaccatgccattataatgcctggcaaaatcaaaagtgcttactaaatatccctgagtacctagtccatgttcaaattttgtcacttatccccaaaatgtatttttactgttctctgttcaagttagggttcagatgagatctacaactgattttgattgttataattcttcaatctcttttatgccacaacacttcccactttttaatgtcattgattcattagaaagattaggtgatttgtcctgtagaatatctcacattctggacttgactaattgcataattgatccatttaatttatcttatccctcttatttcctatgaactggtatgtagacctagagttttgatcataacaggtgcaattctttgggtaagagtatttcagaggtggagctgtgcctttcctgttgcatcaccttatgaggcacatgatgttttgttgccccactttaagtggattctggtgtcagcctgaatcatctcttatgaagctcccatcatcctttcacccagtggttttagcatccatcggtggttgttccgtaaacccattatttctttaagagttatgaatgggctctttagaattctagtgttcctgccgcatttattagctgaagtttgataaagaagacatttcccttaccagcttttgttggtaattagaatctacaggataaataccttttgcttgtcaattttcagagtaatgagttggtgacaaaggagaattaactttttgtttagtttagtttagtttagtattatattgaactctttgatcttcatgtatttgatgagttttaatacagtgctgtcaactgttttttcttggtgcccagttgtccaaacttaggccaatgggagtccttaacttgaattttctgttctttggcatgaccccaatccatcttcttatagctcaagcttgtcttatatttcctgtcccagtcctggaattagccacttatccaaggagacctcattccctttgtggtacttagaaattatcacagggttgagttgctcattcctacttagctttcattgcttctagtccttttcaatggtcagagctaggaaatacagtttttaaggaaaaaaaatttttttatttttttgagatggagtcttgctctatcgcccaggctggagtgcagtgacgcgatctcagctcactgcaagctctgcctcccgggttcacgccattctcctgcctcagcctcccgggtagctgggactacaggcacccgccaccatgcctggctaattttttgtattttttagtagagacgaggtttcaccatgttagccaggatggtctcgatctcctgacctcatgatccgcccaccttggcctcccaaagtgctgggattacaggcgtgagccactgcacccggccagaaaaaatttttattgatatttcccattgaaatttaagattacaggttgtttacattttagattttataatgacatctcttcttatgcttaaaatcatagtttctcttgacatttagttgttttattatatagtaatttcaaaatgcctataataatttcaacattattataaccactcaaagaatactattaacaataagtctactaagtgcgagattcttcttgctttttagattatgtcccactagagatatgcagtcaaaggtatgactttaaagatatttggaatttttttttctgcagggttatgctatcaacctgatatatagttagctttatctattgctgtttccaaattttattttattttattgattttatttgtacaaaatagcatacatagttccaaagttaaaactacatgacgaggtgcatttatagaagtccttcatttcttcctctcctttctgcttcctctgtgctcttctcagtctatccagagagatgacaatttttgttagtttatcttttctttgttgttattgtttttaatataagcatctctctcttgctacacacacacacatacacttatatcgtcctttttcttacacaaaagttagcctactgttttgaatcttgctttcttactattaacaatatatcctgaagattatactgtcattacttatcagtatatagaaatcttctttattcctttaatagctacatattactccattgtgtggaaatgccatagtttattttaccaagagttggaactcttgttgatgctattaattaatgaaaacagatgatttaagttacaaaccagtgtctcctctcccttctccccagtatcagctggaaatatgtttttttactacagaatctataggtaacataagtatcatggatcctgcctttctgatggctttgaaaatgccgcccttccagtggtttgagttccacaatagatgtgttagcacggatactgttcataatacatatttggtggatatattcctaatatttatctggttgtctttttcaagctgatcgcacttgccagtctggatacacaaaatgtcataattcaaatatttgtattcctcgcgtttatttgtgtgacggagacaatgactgtggagataacagtgatgaaaaccctacttattgcagtgagtaagataaaactgctttctttctatcgttccagagatgcatgttgtgagctaatacaaagatatgaagcgtgggtattcgggctgatttcaattgtcatttcacattgaccttctaagtagaggtggtaggcagttgctttcatatgtgattgcaggggtatgagaaactctttctctctgttccctggctagaattcccagaccctgaatatttcttccagagatctgctactattggagagccatttctcccagtgttgaaagccttttgccttcatgtacttaggcagaatttgcccgttaagcccttataatttactcttaatattattatagtggccatcagtaactgaaaattatttttttttcagacagtctcactctgtcacctgggctgtagtgtagtggtgtgatcacagctcaccgcagcctctgcctcctgtgctcaagccatcctcccatctcagcctcctgagtagctgggattacgtgcatgtgacaccatgcccagctaatttttgtattttttgtagatatggggtttctctgtgttacccaggctggtctggaactcttgggctcaagcgatccacccatctcagcctcccaaagtgctgggattacaagtatgagccaccgtgcctgaccagtaactgaaagtatctttatatcccctagatacgttggaatttcagaaatctctatttcgtatttagcaatttggttcattcaaacaatttcctgtatttatagctcaaattaaaaggcctttcttaagtttgataactttgagactattagtgtaaatagatacataatttaaggatttagtgattggacttccctgttctgtgtatatgtagttaaactcttgtcactggcccctcccaaggaaatcaaagggcatcataattatttgtcaccaaattagggtacagcacaggaagaggaatctgttgtaataacagcagcacaaggaagcagaattcaggttgcagccaccagatagggctagacagataggaattattgctgacttttcagggacctctgcttccattgtcagttctcccctggcaaatcatcagatatcaggggccaaagcaaaacggccttatagaccagaagaattacaagactttaattagatgtgcacccacataacaatttggaaaatgcatataaccagagctacctaaaattactggagaaaagagtcaatgttcaaacataggcagagtttcccacttactcaactaaaagtctggtattccaaggatgaatacgaagataactttgccaactttctagagttattatctaacatagctaaaaggttgtgtgtggagcgagcttagatatgatcacattattgttttgcttttaattatcattgcaatggaatttatttaatcttacattatagtagaaaaaataaaaccaagacttataatttgtgatttcatttatcacaaagatagttctttggtatttctaacaaatacaattttttttttttgatttctggaatctagaaaaacaaattggggaattggggcaggattgacttccttctgtctcccatacttcttcctccccacagaaagcttacacaagcatccattttccaggctcagtcttccttttttggtaactattatctagctcagagatagaggcagattgttaagactgatgggaacatgcttgtgttttgctcatgggttttatcttctttccctcctgcagccactcacacgtgcagcagcagtgagttccaatgcgcatctgggcgctgtattcctcaacattggtattgtgatcaagaaacagattgttttgatgcctctgatgaacctgcctcttgtggtaagagagtaagcaagcatgaaaaacatcacgatgcagctagacaacttcagtctcttccaactgcttcaaatacagaccagggtcatggctgctgaatgcttggacttcctgtcccagctttcatctggaatgctgacaccgctcagcggatattcattaagacctgttagtggagagcactgtgtggggagctgatcaggatacggaagctgctgattgatgctgataaaatgaaattatattggtgatgcacctaatacagtgcttagctggtagaacttaattttagttggctctcaattgaagtttctgaatttggttgagtgctggcccagaaagctgtcagaggacctaaaagtgattggagtcatatacatggggaaggagtatattaggagcatgcatcctcttcctgttctctctctgtgccagtttatgagcacaagaggcccaagaagttgcaggagcctttggttgtattcctggggacagttatgccctgtttacatttggaggctgctatttgccttcacaaattctaatctatatccatgcacattttttacataattgtaaaaatataaaaatacaatcttctacattgctttaaaaaacctgtcaataaatcatattgctatataggagtcagaaaactatggctgtggccagttgcctgtctttatagatagcattttactcaaatgcagccacatatggctgctgtccctctactatggccacgtcctgtaggtgcaacagagaccatagggcctgtaagcctaaaatatttactatctagttaaaaagtttgctcgtccttgtcttcatactgccttttaatgactataatattccattgagtggttatagtatcatcaaattaactgcctctattattaagcattaggttgcttttattttattcctctatagtatatatcattgcagtaaatattaacatcgtatttaaaacattttattttcaggatattttcttaggatcattagtatagttttatagctgaagtcaaactattttcaattccagttttctctcaggtttaaattctgtgttgaagagtggtatttggagtgcttcactaagttctttttccccaacactgaaagttttatagaaagcaaagggcacatagagttttgaggacctgtaaaggaaataactaataactgctggatgagtagaatagtcttagagattgtttcaaatgtatgaattattggttcaaatatatgaataattaatatgagtttttaaacttctctatggtaacaaaagccatagtaatagcagtgagtaccaatgacctgatatatttaaataaaaataagcacataatctatatatgaatatatcctcattgtagtaaagtaataatattcagaaatatattttaaagaaataatacgatgtacaaaaaagtaaaatttacattttttcatccttctccaatcccctcactcctcaaaggtaatcactattaaaaggttgagtgtgaatttgacttacttttatcttttatatatcttactttacttttatatatcttgatatatagattttaaaaaaacagatggagtcttactatacatattttctgcaattagcttttattttttaagcttaacatcatgtcagcaaatacagaccagcctcattcctgtacactgccaaagaatattttaaaatgcgaatggtccatgtatttttatccttttcctagtggttggacatttaggttgtttccattttttcactatgaaaaacagtgtcagggtgaacatcctttgtgcacatgtggaaagatccttatggtctagatgtccagaaatggtgctgctgtatcaaaggagatatgtctcttcaaaaaatctggatcaggccaggcgcggtggctcacgcctgtaatcctagcgctttgggaggccaaggcaggcggatcacaaggtcaagagatcgagaccatcctggccaacatggtgaaacctgtctctactaaaaacacaagaattagccgggcgcggtggcacacgcctgtaatcccagctactcaggcaggagaatcacttgaacctgggaggcggaggttgcagtgagccgagatcgcaccactgcactccagcctggccacagagtgagactctgtctccaaaaaaaaaaaaaaaaaaaaaagtctggatcaatgtacacacttttcatagcagcttctgaaagagcctgtttcttgttactgttatgatataggctgtgtctttatcagttgcaactatactttctcttgccttaggctaattccagggtcccctgggtttgggagcctatgacaccttcattagttaaataggaacatgtggggttagggttagagcatctgaatcagtgatggctaatttgaagtagaagagtgacttattttaattcagtatttattgaacagtggtgttctaggaacttttgggctgtgtcagtgaataagacaacaatccctacccacatggagctaatattctaaagaggggagacaggcaaccaatcagtaaattgtctagtatgttgaaaggtggtgctaagtgttatggaaagaaggaaagggagcaaggaagcgggcatggggagtgcaggcgaggggagactttgcacaaaacaaaatggttttggatgaaaagtagattttaaaatagaaacatgtgaaatagtaggtaattcatatctttcctgggaaaagaagtgttctttctctaccatacacataagggaatattgtatctcattttagtcaccaaagataattagggctttgcactgtcagttgactacttttacctcaaactgttggtcgctggtactagtcttattggaggactaccctagatgtatataattaaataatgctctgtttcaggttttctagacaacccatgctacaaccagcttgtctccagattcctggactgtaaaccactttttttcactgagaatgctattgatcttttcaggtcactctgagcgaacatgcctagctgatgagttcaagtgtgatggtgggaggtgcatcccaagcgaatggatctgtgacggtgataatgactgtggggatatgagtgacgaggataaaaggcaccagtgtcgtaagtgaagccaattaattcctctgcagagtcacattccagggaaacacagtagagttgtttttctgtgtttggagagtatgattgcagatttctctgtaattgaatggacactgatagaatgttacctttgtttctccatgctgggagtgtttgatatcatccacttaaatgcttcagagtgatgaaaaatgactttatgtttactttctttctcttacatttggctaatggacataatgtcctacatttctaggggaaaaaaaaaacccacaaatacttggttgtctccttttcttttttcttttctttctttctttttttttttttttgacaaggtcttactctgttgcccaggctggagtgcagtggcggtatcatggctcagtgcagcctccaccttccaggctcaagcgatcctcccacttcagcctcccaagtagttgggaccatacgcccaccaccatgcctggctgattttttatacttttttttttgtagagacgaagtctcactatattggctaggctaatctcaaactactgggctcaagcagtcctcttgccttggcctcccaaagtgctgggattacaagcatgagccactgcacccagtggttggccactcttaatagcaaccttcacagtataacaatgaactgtctctggtttcctttgtcaccttaaagcggcatggagggaggggtgttatgcctcttgagtagataatggaacatcattttcattaccaacagggtatggaaatcttagctagttcaagaattaatctaatcggtgttagaataatgtctttctatggtagggcaatagactcaatggctccctgctgcttgcatctgatggcaccctcctgtgttgtgactttggtggtgggtcacaactccacatttaccctatccaccctatccactgacatgggtggttttcagctacacatacatggattgtggtgtatgcatttctctcacctgtctttaccaacatcatcttctttcttttgtttcctattcacctgcaatgagtctggataaaacccctgttcttttattttgtggacactaatgatttgatgtcagcatctcacctctttcctcatagcatcatggtttctgacaactctgttagcatatgcctttcctctccaccccaatattgcttggggtggtagctataatgtagttggaaaagcactaaatttggaggagaaagacctaggtttgaagccccagctcttcacctagttctatgactttgagacatccagttaaccatctttgagcttcagttttctcatctatacaaatggtgtaaaaatacctatttcacattgtgcttgtgtgattatactttgtaaactaaaaaaagttaccaaaatataaggcattcggtatccagttaacaaaatggtagtggttttctgaagccctaagggaaaaagtatgaccattctaatgtattttatggaaaaataaatgagacattttattgtattgatttctttgaaaaagccagggtccaaagcaattaaaatggaatctttggaggtatttttattatgatctattattataatagcagtgtaatttgtctacgtgttttcctcccatttcctttcatacttagaatggtaagtaacattaaagcaaagagaattaactgctgcactgagctctcatgctttctgattcttgcgtgctttggtttcagagaatcaaaactgctcggattccgagtttctctgtgtaaatgacagacctccggacaggaggtgcattccccagtcttgggtctgtgatggcgatgtggattgtactgacggctacgatgagaatcagaattgcaccaggagaacttgctctgaaaatgaattcacctgtggttacggactgtgtatcccaaagatattcaggtgaattgaggattcagaagttacccagcatgcctcaaatgtccatgggggctgggctcacttacctatcaggcaccccgtggccacagtgcccagggcccatgatgcttttagtggcttatgaaaatgtttggattcctttccaaatcaaagggaaaaaaaacttttacatcaaagaaagtattttaatatataatattaatatatctggctttataccaatatgattgcattaaaatgaaaagaagttacttgaattattaatacataataccatattaacaatttaaaattaaatataatttttaatatttttatggaggaaggaacccaagaaggcaaaaatgcctagggcctgtgaaagacagaatctggccttgcacagagggccagggagatgaatggatagggcttgagataagaattctttcttgaagctggtgacccgcttagttttccacttggagtagaggcattggtattacaagaactgtttcactctcttctctctactacaagaaaaataacagcacaagcatgatgataaatagagcttggctcttaggctcagagtcaagtagaggcaggtggagtgaactgagacaatgtctccaactaaggatgcagacattgatcaatatcatgcagaagggctggaaggccagactttctgatgctctctttttgacagaagttggaaatctggattttcatttgaaatactctgattttaaatgctggaaacaaattttaaaattcttaaaacactgtgtggatcaaacagattcggctcacagcctgctggtttgggggacctctcctgcaatgttccattgtttgacttcttacctctttctccaaatgggcctcttcaaacagtttatatacattcttaacatcccaacttctcatcatcccacttaacaaatacttggattatggaaggaaatggagaagaacaatttgtaagtttcaatcctgattgactaggaaaatagtacgagcattagcaaaagtaggggagtccagaaaggcgcttgctcaaggtggaaggtgagtttgacatagtaggacttcctgaggtgaaagtatgtcttaggtatttgggcacaactggagccgtgaagagatattgcttgtgccaaggactgttaagggacacacacaggcacattgagagcatcaggaatggccaccttacagcatgcgaaggaagacagtgggaaagatatactaagtaggcacaagatcagagaagcagagtcacaggggccattgactggaggggcaggcagctcatcaacaggcgctaatgtaccgttggagtccagtgtggtgtacgattgtgtgtttattgtggtggtcctgaggaagaaggaggaggtgaaggagcagggactcagcagtaatttaaaaagtagataaatgctatcaggaaaatacactctgtgggtgattcatcctctgatgagtggacattgctgagaggtggtagtttgtgaactgacaatgcaaagacattcaagaggtggagctgtcttcttttgtagtgaagctgcagtagaatatgctttgtttgtatttaagtaatatgaatgtaaagtgtagatttttattttttgcacctaaagtggataaatctttgtctatattttctccctactgctcaagagttctattgtgttgcacttctatagtttttctgaatttggtaaatagctaatagcattagtcttagatgtaaatatattctgaatacctaggcttagactctaggcacaagaatggtagcaggtgttgattttgatcagactccaagttatctcctttattcctcccattctgagctttctgggttcttcctttatcattactatgatctcacagcacagtaacatttcctctctccctttctttgttcgtccattgttccttccttcactttccctccctttctctctctctttctttttttccttgagctttctgaatttccttgaaaagggctatagtagaagagaaaaaaaaatactgtttgtttgaaaacctgagctatcagcttctaagtaagtccaaaatctgtgtctggagtagcctctactaggtgtgctgttagtgtgcatctccttgcttgcttggcagaaagtgtgctccccatttggtacagtgggacaggagatcatttttcctattgaccttctttttttcttggctcactactgatgctgctgaaaaacatggatgataagactgaggggtgacaatttggtgatgagctggaatactgacttgcaatagtgtctgaaagcttggtgatttgcttgatgacttgtttttcctcctgcattggatctaaattagacaaaggaaaacattggtgttttcaaaccatttggaaatgagttaaatagctcccgggagaccaaatgaagctgagccagtctgccttgaccacagctttcttcacaattacatgcacacattttgctgtaaatcatgttgacaaggccctgggtttatggatggcagtgctggttagcaggcctggttataggtcagttgtaaaactgaccacattcaccgttgttgccttcacattttgtaatgctctatgtgccgctcctatgctttctatgataaattgttcaaaaccattagctttgttcactcttatcaaagattccttgatgcatatgtgagaccccctttagacatcataacttttatgggatcttggagtaatatggagaagaaaggccagtttggctcacagaacttcaggaaattatattgttataatgatgcctgtgtatgttaggtcccgagatagcttctagtactacagcatgccttcttcctttgccagtatgccatgctaacctactagcttgcctttattcacatcaccatgaagactcacatctcatgatagatggcaggagtgtaatgaaagatggaaggaacaggactgacaatgtaaacgttattccagtgggaagatatgtgttcttagaggacacacccaataatcttatttataatatatagcactcaccctatgagtttccatttgggtatgggcacttttatcatgtgattacccagtacattgccagtgcctactggctatctcattatctgttgaacatagatagtgccactgttcataagctgtctcatagatctgatgtataccaaaattacaaaagttgtatttaattagtttatcaactaaggaaaaaatgaatgcaattatttttaatagctatagacctactaattatctatagctattaaatggtagcatttaatggtagcatttctaatggtagcagccagcccctgaggaagttgtgtggaatgccaaatattggattcttctagaattggcgattagtggggtagacgaagatgatgggggaaaggggatcaaggacactggtgatcttgtcgaaatggttgacctggcatttaggtagataaagaaggaagcaaaaccccaagtgggtaatagttgaggtttattgccaacctctctgaaagtggtactggatctcatgatacaggtgtgaccggcacaatgactgtggtgactatagcgacgagaggggctgcttataccagacttgccaacagaatcagtttacctgtcagaacgggcgctgcattagtaaaaccttcgtctgtgatgaggataatgactgtggagacggatctgatgagctgatgcacctgtgccacaccccagaacccacgtgtccacctcacgagttcaagtgtgacaatgggcgctgcatcgagatgatgaaactctgcaaccacctagatgactgtttggacaacagcgatgagaaaggctgtggtgagtacaacagaggatttgggaaaaggaaacaggggagactgaatatggattctcaacccttcacgacttagactttccaacctgtcctctaactacaaagttaccataaaatcactattcctgatatagcaaaaggttaccaaagtttcttggtatataagatggggacacacatttttttggaccaattctttgcttagatagtcattagagagaacagaagatgggcaaatattcaggccatcatttaacattattgccaaataaggtactcaagaatgaagggaaccaggttgattctctttgaattcttgtaatgactttttgcctgaagcatccctctgctagaactcgttggcctgttcttcatttttgtcctcaggtaattgaatgggagagtttaatatctctctcaccccaaccaccacaagtaaagcagttgagaatccacagcatgggcattgtttgcttagcaccatcttgaactccataatattggcagttcgtcctgtttgtggtgtttaatccttgtaaccattgtttcatgtatgttgatattgtctctgtaataacaatttagagaccatatcctttcatttattttgttttctttattccacttgttcattgtcagtactcattgaaagcatttgcctaattgacccagaagtatgtaatgtagtttttatccttatatgaaagataagatttatatgaaataacattaaaattaaatgctagacagaaactgctgtggaaatgtggagaagagattatctatgcataatattaaaaaatctgtgcagcaaaccaccatggcacgtgtttacctattataacaaacttgcacatcccgcacatgtacccctgaacttaaaagttgaagaaaaaaaaagaaaaaaatttaaaaatcatccaaaaactggcttttgctctattgtaagaaaaacttctataaatttctaccaaagtttcaaaaaccatttaataaattaagaaaaacatgtgctatattatacatttatacaaaaatcatagggaactttcttatgtttactcctaattcatatagattcccattgcattttaattaattttgccttacctcaactataagaattaaatcctcaatagtacataattcaaattaaaatttttagcttgaagacgaagtgatctcagtaggtctcatccaaacctatgaaacattcactcttacaactggaaggagtactagtgatcttctgtaccctgttctctttgcagataataagactgtagcccatagatgggaaacgaattgtttgggggtgcacagtgaactagtggaagagcttggcctgatatttggataatggattttgcaatgcatgaagttttaatctattgctccttgatgagtagagaactaataagaacttgctgtcctccctctgtagatcatttttgggtgaggttgcccatgtgttacaggaccagccagagggacatgtagtgttgtgttgcacctagtgttgagctcatgccatctcgtgagaggcaaatgtgtgtatctctttgtggttccatgttcagtgatgtcacactggaagcctgagcttgaccatggtgtgaacagtcacactggaacatgctacaaatcagagcatttagaaaatttttcctgagtcctgtttgaccagcacactggccaggctcttttcttctcctcttctttctcatttctcctgtattagttgttgaaaccactgatgaaggagtaagttggtgaggaagttgaaaaatagtgacttttcaataatccacagtctttggaagtctttgttgtctgtcttagcatgattcattaagaattggcactgtttagtagaaatgttgactttgaaccattatagtgagttggtcgttgatattttaggatctctaagaactgctttttacctacaggcattaatgaatgccatgacccttcaatcagtggctgcgatcacaactgcacagacaccttaaccagtttctattgttcctgtcgtcctggttacaagctcatgtctgacaagcggacttgtgttgatattgatgaatgcacagagatgccttttgtctgtagccagaagtgtgagaatgtaataggctcctacatctgtaagtgtgccccaggctacctccgagaaccagatggaaagacctgccggcaaaacagtaacatcgaaccctatctcatttttagcaaccgttactatttgagaaatttaactatagatggctatttttactccctcatcttggaaggactggacaatgttgtggcattagattttgaccgagtagagaagagattgtattggattgatacacagaggcaagtcattgagagaatgtttctgaataagacaaacaaggagacaatcataaaccacagactaccagctgcagaaagtctggctgtagactgggtttccaggtaagaaaacactgatgagctttttaaaagttaaaaattaaaaaattctaaccatgttttcatcttgataggaaattaatttttcaacttgggttaatatgcagatacatttaatgtttctgcaggtttattttctgctttgtatctgatattcaaatgatagattcagaacagaatatctaattattttaaaaatttatagtatcatttttatggaaagaggaattgcaagggaagagagttcactgttgctggccattcacttaactggagatgatatgaagggacgattcatgcattcattggtgcattcagtcgttacttcctgagtccctcctacatgcccagcgtgatgacaagcagcaggggttttgaggggaacaaggcagacatggcccttgctctcctgaagtacatagccttgcttacaatacttgtcattggccgggggcagtggctcacgcctgtaatctcagaactttgggaggctgaggtgagaggatcgcttgagcccagaagttcaagaccagcctgggcaacatggcgaaatctgtctctaaggaaaatgaaaaaaattagccaggaaaggtggtgttcgtctgtagtcccagctactcatgaggctgaggtaggaggatcccttaagcccaggagatgcaggttgcagggactgagaacatgcatggcactccagcctgagtaacagagtgagaccctttctcaaaaaaaacaaaacaaacaaaacaaaaaaaacaaccaatactagtcattcccagcatgggctgggcgtgaaaactggagaatggctaacatgagactcttgttttgagattgcccttatggaaactgacagtctttaaggcaggccagtgatattttaactaaactaccagatgaaccacacttcttaacatctctattgaatatcaaatctatcggattcttggcagcataaactaattggctttgtggtcaatagacatcaatctgcaggcactgtaaagatgtatgctgtaaagattcttgttgcagtcagcccagacctccagagggctcttccccacatccttatatttgactcccttaagggtaaagatcctaaaatgggtggggacagttggcttcccagttctccctgaccagtagctggcctgacataggtgctgagtgcttgctggataataaatgaaacgttgactaagcattcctattgtatgtatcaattcctgttttacgtatcctacatgtcaaaaagtatagtgattaatgatttccaggaacagaactgagcatggtactgttcttgtcaccatcctttgttccactgcagaaaaaataatatttgaactgtaagacattgtcattcagccctctctctcagaaactgctagaatgacgtttctcttggatttcagctatttcctctctatctcggtgtgttctttatcagaagagaattaaatacatgtgaggaagatgggcaagaaagtctgggtgagggtagggtaaacttttcttgaaagtccaggagggtgcacaaccaggctcagtgttcctgaaaacacaaaggcagaatggagcccagttacatttacattggtagggggcagttctaagatactagctacactgaaattagaaacaacttttttctccaatattaataaatatttctgctgtcagcattagggtgtttggtttccaaagcccttgcatttgatataactttttaaaccaccattacgcacattggaagatactgttggctctcagttatcttaatttttccagtagtggagacggaatatcttctccatgttttcttgagaagaatctgttcacaggatgtcttttgactgtggaataaagagaaattaatgggaaagcagtaagctcaacagagtagagtgccctatggggtagccagtctgccaggacttgaatggtaatagcaacaggaatactaatacgacaagaataataatagcaactccttctaagcctgttgtgatctgaaataatataatgttttaaaaagtccctggtctgaggcctggcatttaacaagtgttcaataattagctactattattctcactgttcttagtgtctaccatgatggaatccaagattgtagccatctcattcatcaggatttactcatttacccaagtgaattaactggcaagacttgtacatatatggatactcattctttcttgctgaagcctgaagcgatgctactgtcctaactattcagatatccagcatgaatggttaagcgcgtacttgttgcaaagaggcattcaggtcttttggaagggaaatcattctccttcattctccttccggttggaattgattatcaaatcctaaatgaccttctcactataggtgcatttaaccctttggaaggttatggatgctataagactctggtgaaagccctgggcccctttagaaagtacacagatcaccaaagctggcttccctgattctgggtaaagaccttgggttaagaacacttaccttataagaaaaataaattttattgaataaaaatacatttataacagaaatgtccttgaggtagcagtttctaacagatcctaatatgtttctaaagcttcttaggtttgattaagtgaaatgtgtctcaggttgagaaactcattttgacagcctgtctgacagaggcagggatgtctctttatcctaaggatgtcataatctttatcttaagaatgtcataattcagagtttctctgtgcagtttcaatgacacacttagacaagtgtgtttccttgactccaccatttaaactgtaattcatgatactcacctctgcttccctgttctgctaagcctttgcactgcctggagagggtgccttatgctgcatgaggaaagtaaaaccagacccgtcgaatgaagtgtgtcccccgtattttctacatgacaccaccttaaagtgggaattattgcacacagtcttgcaccctctgttgcctcactgcaggaagacaaacttcctgttttcccctgccctcatttgcctgaagaaaggtgacttctaacaactgtctgtgattctcaggtagcttgggtaggaaactgggtggctaaatatgtaccatttcacaaagtgactgtattggttaactcctggctctccattttagaaagctctactggttggatgcccgcctggatggcctctttgtctctgacctcaatggtggacaccgccgcatgctggcccagcactgtgtggatgccaacaacaccttctgctttgataatcccagaggacttgcccttcaccctcaatatgggtattgtctccctgcaatcctgggcttttctttcacctccttcttctgcctctgttaccgagaaggctgttcatgtaactatctcaaggccaatgtcttgctggggtttgtcttctgcttttcctacttggtaaattgtttagtgtaatgagtagaagcatggcttcttcaaatcatcatcatcagctcttctgttttcttttccctgacacacttttgcacttttcaagtcctgtattttggctgcatgcaaagaaaactgtggtttcagaaaaccgatttctttactggactctcgaagtcaaagccactgaaatccagttaactatgtttatttgtgagcattttctgtacattgtccccttcctttttcttttttagattatttgctgttagctctctttcttttctgaatgcagaaaagaattcagaatgcagtctgctctacagaatgcagactccatttctctaaatggagaaaaggtgtgtattttggctactgacttcttttggcatcagggactgaccctttgtgtttgccctgacaggtacctctactgggcagactggggtcaccgcgcatacattgggagagtaggcatggatggaaccaacaagtctgtgataatctccaccaagttagagtggcctaatggcatcaccattgattacaccaatgatctactctactgggcagatgcccacctgggttacatagagtacgtacatagaaaagcataaaacaattgtgtaactgtttatttcaaacatcagagcttgtgattccagtctattagtcccctctattgtctaactggcctgtctgttggaagtcattcgggggaagtcacacttctaactaaaactgctgagctctatggtatggtgcagtagaaagagggtgaacttttaaatcatatggatcagggtttatgacctgatgttttcacttcttattgtttttttatctagaaaatggggctaataatctctccccatggtagtcagctcagtgtgcaactcatcttaattttttttatctctttaatttgctctcccctatgaaatatatgattaataaattttagtatttgagaaaaggaaaagaataaaaggatctggaaaactttccctaaaatactttggcacatttatggttaagtgcagtgcagtgttttaggtggcagtagagtctgttaacattaatccaatatgataaggcatttacatctttctggtaataggataatttttaagtgtgttaaatatactgttcaataaaaaatactcattgtaaaaagatgatacacattattaatcaaaaattaaacaacaatacccatattgaattttgctagttatggcctagttggaccatagtattgtcttctgcataagcatttatggataacgatccaggaacagcctgttgcactcagaagcatggaaatgccattcattcagtagaactatttcaaatttttttattttatttttagaaattcctttcttctgttatatttattttgctgccaaagtcagtgtagtaaagtttgaagttctctaacaccatgctccctggggacatgccactgaaaaagaaggaatacctggcacacacgccagtgctctttcttcctgtgctcatggcaggcataattaatcaatccaagtactttctcttgttgaactggttcatttgctacactaaggtagcctttagcattctcattgcagaatttaccgtagcagatattaactcactcttagggtagagactaactttaattagaagcagtacaatattatttctagtttacttataccattttgatgtgatatgctgatggtaatacccttagcccttcccacagtgtgtgtatcctctcttaaaaggcacatcaaagagctgagttagctttccatataatcctatattgaattagtagaagcatcaagatgttcaaagaagcttcaacaactttctaactgacatttgttgttctttgggtcctatagattattcttggtcttgaaagcttagtaggtgtcactcagcatacatttagacagtgtttccaggagcattagagatgaaaaaaggaattttctagttacacaatattctgttcactttttgataaaatctaatatagattatttacgtagatggattataaaatttaggcagtagattttagtctaaaagtcaaatcataatatgaggcactgtgatctgggaataaaggaaactttaatattcatgagccatgttaaattggttacctcttggagaggtagcaatgcctgtgttcagaaatatatttcatagatgcataaagcaatagatttttatagagcatgcaattgattccttgtacatcttgggatgcaccaacacatcactggagctgtgcctgtagttctactcttactttttttttttgagatggaaattcgctcttgttgcccaggctgaagtgcgatggcgtgatctcggctcaccacaacctctgcctcctgggttcaagcaattcccctgtctcagcctcctgaggagctggtattacaggcgtgcaccaccacacctggctaattttgtatttttagtagagacagggtttctccatgttggtcaggctggtctcgaactcccgacctcaggtgatctgcctgcctctgcctccctaagtgttgggattacaggcgtgagccactgcacccagctgtgtagttctactcttgacaaaaagtactcatagagatatctgagatctctctacagagattacagatgaactggaagggaaggtctcaggactactttctggtctatgatttttttagaaaaacagatggtggctaggtgcagtggctcacacttatagtcccagctctttgggaggctgagcagggcagattgcatgaactcaggagttcaagaccagcttgggcaacatgacgaaaccctgtctctacaaaaattacaaaaattagctggatgtgctggcacctgcctgtcccagctactcagaagactgaggtgggaggatcacttgaacccaggaggaggaggttgcagtgagccaacattgtgcaactgtactccagcttgggcaacagagtcagactatctctagataaataaataaataaataaataaataaataaataaataaatcagatggtgactaatttctggtcatttacctgcatccttatcaacaaaggccaagcacatcttcaagttttcctatgacttttataagttaccataaattatattttgggaaatatttttaacattgcatggctaacattatcaggtttcttagttgctagcttgttctatctcctgtttgagttttaggatctgttccaaatttttaaaatattaaattttcactattttagaaatgatttctgatatagacccacagtaatgaaagcccttggaactgagaggacttgggaatttggctgtggatcctttgtaacatcttgaaatcggagaaccttctctggaggtttattcatctgtaaaagtattcgctaatggtgccatggcacgattaataataaatgtcctgctggtgtttgcaaagttaaccctgcaggcctgtaagttgtgttcccctcaggttatactgagaatgcaactatctcctagaataacgtcccctccggaatgttaatgagaaggtagaattccagtataatattgctatcttctgatttcttccaatggtgttggaagaaacaagaatggtgttcaccccaggatatcaaaagggtgcttaatgaggaacatcactataagaggccataaacctacaacagctataacagcttcatccgcaggaaagcagctgtggttaggaattagtgattatttaaactcctgacactattcctattttgttaagtattgctttttcacttctacatcttttgttcaatttgaattcatcctttaagtttaatttttgttttaattaaagactaggagttttgaggatctgaacttatattatctctaggaggtagaattttattgatttgtgaattcttttatcctgcaagacattagaggagaggaattacctttatcacataactgtttctgcttactgctgcaggtactctgatttggagggccaccatcgacacacggtgtatgatggggcactgcctcaccctttcgctattaccatttttgaagacactatttattggacagattggaatacaaggacagtggaaaagggaaacaaatatgatggatcaaatagacagacactggtgaacacaacacacagaccatttgacatccatgtgtaccatccatataggcagcccattggtgagtaggtgattgaggggtttggcaaggttgccttgggttatgtgcatgtcatgattgtctttaagcatgaacttcgtgatttacaaaaagtttgttgcacttgttagtgttttcttcaaagcatatgctgaaagttgacagtaggcaaatatctttagagtttatcccccttcccctgggaaagactacctagaactcttcatcttcttaaaactcgctcaattcttcaagatcatctttttttttttcctttgtttttgataagatttaacagttatcatgttgccatatttacttcatctatttctatgggaagactgaagtattttaaaggaattaaaaatatggcatttcagccctaaatactaaatactaaataaatgcatatgatattgtattgtgtataaattagatattattcttatcttctagaagataatgtcaagagcagtgcgttttagtgttttttaagtaagagaacttgtttttatttgattgtgaacttatattccttttatgcaattaaagcaactttatgatttagagtctgaaataaagataaaggtctgaaatatattttggggatagactggtttttgtgggtctgctttgttgtgatgtcttgctaaaacatatgataaacttggaattaaggaaaaatgagaattagcaaaataaagaaatttagtatttctttctggaagttaatattcttcatatcatttttattagaagttcaagcaaatattcacctcaaagtggtgaccaggaaaattagtaaagatgctgctcagtttattcatccacattatttttggccaaacttgttacctgtatacttagaatgagggaatgaatatagcatctgttggaaattaaaactttaacctaggtctaggcaaatgaacataagctaagtttactgcctgctttcccaggacttggagaaacacatcttttctagtcagaaacaccagtgggtatagctcacttctggtagcatataaatgagctttcttaaagcacagggttgttgcttgtataactctatcatctgttttatttaggaacttttgggaaaatcataaatctaggatagttttttttttactaagaggtgatgagtttaaagtcaagatgtgtaatcagctaatctgtgcttgatactctctttcagcaaatgaacacatattttcttccttttccactagtgagcaatccctgtggtaccaacaatggtggctgttctcatctctgcctcatcaagccaggaggaaaagggttcacttgcgagtgtccagatgacttccgcacccttcagctgagtggcagcacctactgcatgcccatgtgctccagcacccagttcctgtgcgctaacaatgaaaagtaaggctctctttcccctctcctcagtgcctctctagcccgtggacagacattgaccttcaaggctccaagggatgggagttttctagtgagacaagattttggttaattaacttggttcatgtggaacacagcaagactctcagcctccaacttcagataatattttccatgaatagaaggagcttgctaaccaaactgttatgcctatatatgcaaactttcatagaaaggaagcaaaccatatatttctcatttctaattgtcttaagtattggagccagagtgtatataagtacatactgaaaaattgtccctagaagtaatagaatttcactgtcttttccatgtctatgccggcctagctccttagctgcctatgctaggggatccagggttacacattcaaatccatttttgatcatttgtgtttgctatgaaacatggccacagattattttcttaacaatgtccacaggcccattgataactaggggacctgagttagagagtggcatggagagaggcattaatgcagatcatagcatctaagatgcagaggtagacgattgtagtgattaaataagatatctgagattaagaatctagcatacatttatcgtgagaaagaccctcaacagtttttattgccctccaacttcccaaacaatacttttatatcaccctggcagacaatctcaaccaatcactgctcctagaacacagctcaaaacacccactctttatttgtttattgttttttttttgtggaggaaatttattcatcatattaagagcacattttcagtttgtatttggatcttaagaaacctgttctatcttgccaagttatgttttctctgaaaatacaccattgtaactgagatttaattgatcctcttctagggccacgagagagctcatgcatgtcatttcttggaattcagtgttgacttcttctctccagataactgttgcccctggtgctttgctaaagaagtgctgtatgttctctgtgcaggtgcattcctatctggtggaaatgtgatggacagaaagactgctcagatggctctgatgaactggccctttgcccgcagcgcttctgccgactgggacagttccagtgcagtgacggcaactgcaccagcccgcagactttatgcaatgctcaccaaaattgccctgatgggtctgatgaagaccgtcttctttgtggtgtgttgagtcgctttatgcctctttttccgacttctatgttgattgtatacgatcatgattctgtgggtatttcctgaatatcatgaactaaaaaccagttcaaagtcctagaaggaaactcaggctccatcctttttctatttttatgaagtttttttttttttttttttagaaatcttaaggtttttacaaggcaaatggttgaagtagacaataagttgtctctactggtggctcttcaccatgtgctgggcattgaatcccctttgagagctaacattgaggaggaaacgagaggtttccacccccatttttaacagggactctcagttgtcatatttatttatgtttccatttaaaaggcaaaaaaaaaaaaaaaagactgagcacagtggctcatgcctgtaatcccaacagtttgggaggctgaggcaggtcgatcgcttgagcccaggagtccaacaccagcctaggcaacatggcaaaagcctgtctctacaaaaaatacaaaaaattagcctggcatggtggcatgtgcctgtaatcccagctacttgggaggctgcagtagaaaaatagcttgatcctggaggttgaggctgcagtgagccgagatcgtgccactgcactcacttggtctcaagaaaataaataaataatcaaataggcacaaaataaaattcccccaaactaaaaacaacacatcaataacagtaacaaacacaaagtttgaagactattttccagtaggagaatagggacagaggaaggtatgcttaacaggtcagggtgttcagttcttatctcttaagtctgtatgcaataaagagatatttaagaatttgggagacagtaatagtcaaaagaagaagtgctccatgtagtagtactgactgataagtacattaggaaataagtcctctaaaaagaaatcatgatcctgctatccaggattcactgatgtcaattaggagctttcattcttgatgccttccaagctgataaccaaatgtccctgctctcagagaatcaccactgtgactccaatgaatggcagtgcgccaacaaacgttgcatcccagaatcctggcagtgtgacacatttaacgactgtgaggataactcagatgaagacagttcccactgtgccagcaggacctgccggccgggccagtttcggtgtgctaatggccgctgcatcccgcaggcctggaagtgtgatgtggataatgattgtggagaccactcggatgagcccattgaagaatgcagtaagttcctgtgggaggaccaaggcatgaccagagcagggagacacgaggaaacttccatggggactgagagaggacatggagctttctttttcagctgatgggatgctcccccttggcactccctgcaaactctggcactgcaaggcagagtatagctgtgtggcttgcaggtggaaccagactctgtttctgaagtggctaatacctccttttgatacatagaatgtctaaccaaccagaatatgataccaagaacttatattttatatatctactgctttctcacttgagccacagagaaatgttatgaggtagggaaggtgggtgtgaaccaattccattttacagatgaggaaactgaggttcacattaagtggatggttacattactgtttagtgtcagacctaacacttcaacccaggttttttacttcaaaccctgtccttccccaaccccacccacaaagttatactgtaaaacaaatgagtggtgctgacatattgagaaaacttaggactatttttctgctcatggtaaacagatcacatctaaaacagacacatatcgccagaggcggtttgcttggtaacatggtcattgttattcctcagtaccacaacctcaatgtgacaatggaaaggtgctttcttgtaccttcagttctgactttgatgcctcctcccttttcagtgagctctgcccatctctgtgacaacttcacagaattcagctgcaaaacaaattaccgctgcatcccaaagtgggccgtgtgcaatggtgtagatgactgcagggacaacagtgatgagcaaggctgtggtaggaggggccacaggggagtggagggagggacaagaaagtgcacatgtcaagtgccatttattagatgagagatgagagtgtatttcccatgtcatcttttctttgtttacctctgtaaaaaaatggttgattcttctaataacatgttacatttttgtagcattttgcagggttaccaggggtatttaatttgtagcactttaagtcatgctgtcattgaggaagacgttattaagatgttagaaacttgtgtaatttcttccaaatgtagaatccttattcatacttgacaagtttaaattgtttctctaattttataaattggttgaaattggtggaaaggggttagagaaaagacttcgtatctatctctaaaaaggatatttccaaattaggatatttcttatttggggattttcatattctgaatgtctctctgattttccctgttatctattggacatctgtagtctctctggtaacatgggaaagccagataaattaatggaatttgtcaagattagtcatagtctaacttgaaaccaaagcatctggagtatgtgtgttgggtttagttggaagagaagtaaggaagatactaaattcttttaagaacactgagtccaattgactgaagataatatgatcaaaatatttatttattatggcatcattttagcctcccataccaggcctttgttgcaaattacaaaccagataccatttcattctttgcatggtttctaccaatgggaatggatcgagtttcaagtggtaggataggctcagggtagctaaaagagggaatgttgaccatgaatgttgctggcattcctctctttgggagcttcaagagtgagctaatacaattctcagactgtctcacaaggaagccaatactactttgtgcatttctctgccaatggtttatgaagtctttgcaatgactgctttgcagaggagaggacatgccatcctgtgggggatttccgctgtaaaaatcaccactgcatccctcttcgttggcagtgtgatgggcaaaatgactgtggagataactcagatgaggaaaactgtggtgagtgttcacagtcctatggtccttatataccaccagagctgtgatgtttgctttttgtccataattcaactgtctatgtcattgatcctcaatgggtaggatgatatcaagctgtctgatctctttctttctgctggtcagtacatttctactttctcttccactaaagacataagcatctccttctgagatgtttcaaatcaagcttttggaggaaggtatttactgaagaatatcttttatgtgttgaatttatttacatccaacttttttttccaaaagaagttgaggtgacttatgataaaggaaaaatgtaataagataaatagaatagaaatagaaaaccaggaccagagaagtagagggaggaagggtgctaacccagagacactgcttcttaagctctttccccaaaatggccttcataggagaggagagagaacttgtgtttgcattattacccttcctagaatagttgactattttaggagggctaacagttaattaacaggacaggttttagtttctctctcccagtcgaaggtattgactacaaggcattggatagggaggttgaggaaaggaagccaagaggctgagatcatatcaaattagatggtcagaacacactcaatgtgtgttctgaaaacaagcttaatgaagccctgcccagagtgtatatcactgacccatgatatgcgtcaatttctaattgactaatgaaacacattctaactttgtttaccttttggaagaaaaaagtgatcaccacttgcgataagcaatgagagatttaggaagctgactacacctgcaaatatcagttagctaaaaacttatacaaaagggtaatccaattggcatt

SEQ ID NO: 1133 - DNA, 352 bp, Homo sapiens
aaggatatttagccttagattttgagagggatctatctgcttttgattcctggtgtttcaggaggaaaaccgagttatatcccaaagcaggatcgtagtgcctcctctgtttttcccaaggagtcccaggctgttagaagttaccttaggtcctctcatgtgtgcaacaaaagtggcaagaagacaaaatggagaaaaacaattcagttggctaaaaagaaaaaaataattaaaaaaaaacaaagatccaagaagagaaaaaaccaaaaggccctttaaacatacctatagcttggatatccacttttaattaagctgacttttaactatagcgctctttctaaaaaaaaaa

SEQ ID NO: 1134 - DNA, 325 bp, Homo sapiens
acaaatacctttttttttttttttttttttttgagacggagtctcgctgtcgcccaggctggagtacagtggcgcgatctcggctcactgcaagttccacctcccgggttcacgccattctcctgcctcagcctcccgagtagctgggactacaggcgcccgccacctcgcccggctaattttttgtatttttagtagagactgggtttcactgtgttagccaggttggtcttgatctcctgacctcgtgatccacccgcctcggccacccaaagtgctgggattacaggcgtgagccaccgcacccagcctcacaaatcctttt

SEQ ID NO: 1135 - DNA, 113 bp, Homo sapiens
gaagcaggagaatggcgtgaacctgggaggcggagcttgcagtgagccaagatcgtgccactgcactccagcctgggtgacagagtgagactccgtctcaaaaaaaaaaaaaa

SEQ ID NO: 1136 - DNA, 4224 bp, Homo sapiens
gaagacttttccttcaaggaaccccagaaaaatgtgcatgattttgagtgtcaatggagagatgacacaggaaattacaagggagtgcttatggcccagaaagaaggtaaaagagatcaacgcgacagaagagacatagaaaacaagcttatgaacaatcagcttggagtaagctttcattctcatctgcctgaactgcagctatttcaaggtgaggggaaaatgtatgaatgtaatcaagttgagaagtctaccaacaatggttcctcagtgtcaccacttcaacaaattccttctagtgtccaaacccacaggtctaaaaaatatcatgaacttaaccatttttcattactcacacaaagacgaaaagcaaacagttgtggaaaaccttataaatgtaatgaatgtggcaaggcgttcactcagaattcgaaccttacaagtcataggagaattcatagtggagagaagccttacaaatgcagtgagtgcggcaaaacctttactgttcgttcaaatctaactattcatcaggtcatccatactggagaaaaaccttacaaatgtcatgagtgtggcaaggtcttcaggcacaattcataccttgcaactcatcggcgaattcatactggagagaaaccttacaagtgtaatgagtgtggaaaagcctttagaggacattcaaacctaactacccatcagttaattcatactggagaaaaaccgttcaaatgtaatgaatgtggcaagctcttcactcaaaattcacaccttataagtcattggagaattcacactggagagaaaccttacaagtgcaatgagtgcggcaaagcctttagtgttcgttcaagcctagcaatccatcagacaatccacactggagaaaaaccttacaaatgtaatgaatgtggcaaagtctttaggtacaattcatacctcggaaggcatcggagagttcatactggtgagaaaccttacaagtgtaatgaatgtggcaaagccttcagtatgcattcaaacctagctacccatcaggtcatccatactggaacaaaacctttcaaatgcaatgaatgcagcaaggttttcactcaaaattcacaacttgcaaatcatcgaagaattcatactggagagaaaccttacaagtgtaatgagtgtgggaaagccttcagtgttcgttcaagtctgactacccatcaggcaatccattctggagagaaaccttacaaatgtattgaatgtggcaagagcttcactcaaaaatcacaccttagaagtcatcggggaattcattctggagagaaaccttacaagtgtaatgaatgtggtaaagtcttcgctcaaacatcacaacttgcaaggcattggagagttcatactggagaaaaaccttacaagtgtaatgactgtggcagagcctttagtgatcgttcaagcctaacttttcatcaggcaatacatactggagagaaaccttacaaatgtcatgaatgcggcaaggtttttaggcacaattcataccttgcaactcatcggcgaattcatactggagagaaaccttacaagtgtaatgagtgtgggaaagcctttagtatgcattcaaacctaactacccataaggtcatccatactggagagaagccttacaaatgtaatcaatgtggcaaggtcttcactcagaactcacaccttgcaaatcatcaaaggactcacaccggagagaaaccttaccgatgcaatgagtgtgggaaagccttcagtgttcgttcaagcctaaccacccatcaggcaatccatactgggaaaaaaccttacaaatgtaatgaatgtggcaaggtctttactcaaaatgctcacctggcaaatcaccgaagaattcatactggggagaaaccttacaggtgtacagagtgtgggaaagcctttagggtaagatcaagtctaactacccatatggcaatccacactggagaaaagcgttacaaatgtaatgagtgtggcaaggtcttcaggcagagttcaaatcttgcaagtcatcacagaatgcataccggagagaaaccttacaaatgagtgtggtgaggtcattaggtacaattcactcctttcacatcagttaattttcatttttgacagaatccttacaaatgtagtgacagtggccaatccctcatgagttgaagcattaatagatatgagaggccataagcaagagacatcatgtaaacatatgtggcagagggtctatccaggcctcgcaggttactaggcatcaagatttatatctttgatgaaacgaaacaaatgtaatatgcatcctgaggccattacccagtgaccgatggtaagtgaggattcctaggaggaataacagtctctggtttccctgtttgcctttgatattatacactgtagaatactcacaagtccaaatatgctaaaaattatatatttttaactcacatacgaaaaggttgcaggatatttgtaggcagtcagttaccttcaccttatgaaatgtttcactgagttatttgaggttttttggaaagcctactattgcgtttcaatgtgaactttgaaatcttattgtgcatccttacacaccttccatggtgctttcttggaaagatcattgggatggaaggatcattgattgggtgaagatcattgattaggtgaaggattatttctatccaatttgtgaagaaggaggactttgcttttaaaattaagtatcatctgaattagcatttgggagtggcgaaaaacaatgtaaaactatgatgtcactcaccattctgataatgttcagggtgcctttctcctaccaggagagtactgtggcttagaggaaagaaatggtctatcaactgaacatgaaatggagcaggccaagaccttaggacattgggatttttgtgggaggagagtaataggtaattagacactgattgtgtggtagaaatactgcaggggaaaaggtcgcccttttatgcatcaaagagcaatacctgttgtttaacaaagagtgatgaaaaattgatcttgttttgaaattgaagagagaggccaggcgcggtggctcacacctgtaatcccagcactttgggaggctgaggcaggtggatcacctgaggtcgggagttcgagaccagcctgaccaacatggagaaaccccaattgtactaaaaatacaaaattagccgggcgtggtggcaggtgcctgtaatccccagctacttgggaggctgaggcaggagagtgcttgaacccaggaggcggaggttgtggtgagccaagatcatgccactgcactccagcctgggcaacaagaacaaaactccatctaaagaagaaaaagaaaaactgaagagagagtagttgtcagagtgaagagtttaatcaacagaagtagagtaacatattctttagtagaactcacattatctgcttgaagcacattttgctaatgttttattcagaatgtatcatagatataatgttttaactaataaaatagaatggtttttctctatgaatgaatcacattctttctgccaacatagttttatcctgtctcagtaggatactccataacacaatagcagtacaccactaggctcttaaacgatcaagaacaatttttttcatggtgaaatcaaataacgcagttttggaaacctataaccgcattttgtgcttgaattacgtgccccacactgtggcttaggatacttattggggtataatgaaaatcttactgaaagttaatttcacattcttacaccccaaaatctgcattgccattgatgcatatgcaccacattattatatttccacatcagtttcttgtgtgccaaataagacccatgctatgcatcttggtttccatgaagtgaaaatacatagtaagaatgcgagaaatataaatcaggccaggcacggtggctcacacctgtaatcccagtactttgggaggccaaggcaagcagatcacctgaagtcaggagagaccagcctggccagcatagtgaaaccccatctctactaaaaatacaaacttagctgggcttagtggtgcatgcctgtagtctcagctacttgggaggctgaggcaggagaattgcttgaatccaagaggcagaggttgcagtgagccaagatcgcaccactgcgctccaacctgggtgacagagtgagactctgtctccaaaa

SEQ ID NO: 1137 - DNA, 9439 bp, Homo sapiens
ggagtggaaatgcctggaccctgctcagaggatcttatacagggacgtgatgttggagaactactggaaccttgtttctctgggtgaggatgactttcttccagaagtcaagatctgttcttgtctattgttgcattttcccttacgagtccctggagagcccctgcattgcttgactgagattgaagtcctgttgactctgaaatggaaagcttaatcatgggaaacctggactttaatcttcccctttctcagatgttctgcctcctttgtacttcatcatttgaggtttcagagcttttgtatgcataatacattgtgttagacttttgaaatgtcagatttcctgttttctacctctctgctttggattaagttgttggtggaatagagccttctatcagcatgtaccatgtttcctgggtattcagaaggaggcattcagtggatgattttttttttttttttttgaggcggagtctcgctctgtcgcccgggctggagtgcagtggcgtgatctaggctccctgcaagctctgcctcccaggttcatgccattctcctgccttagcctcccgagtagctgggaccacaggcgcccgccaccacacctggataatttttttttatgtttttagtagagacagggtttcaccatgttagccatcatgatctccatctcctgaccttgtgatccacccacctcagcttcccaaaatgctgggattacaggcatgagccaccgcgcctggcccagtggatgaatttttgaagttttcttagatccacatataatgtcctctcatgtaaacatagggctgggattctggaaaagccccggcacattgtgatcctttctttttataaacaggactgtgtcattttgatatgaatattatctccatgttggaggaagggaaagagccctggactgtgaagagctgtgtgaaaatagcaagaaaaccaagaacgccggaatgtgtcaaaggcgtggtcacaggtaagagctcagatgggcagagagaaggccactcattaactagagtgtgggagggggcacagtagctcacgcctgtaatctcaacacttagggaggccaaggtgggcagatcacttgaggtcaggagttcgagaccagcctgaccaacattgtgaaaccctatctctactaaaaatacaaaaaaaaattagccgggcatggtggcgtgtgcctgtagtcccagctactcaggaggctgaggcaagagaattgcttgaacccgggaggtggaggttgcagtgagccaagatcatgccactgcactccagcctgggtggacagaacaaaactccgtctcaaaataaataaataaataaagtgggaaactctctgcagatgagagagttctttgggaaaataagttgccttagagatagaggcaaagtctttatcatgatggacaacaccctgtcatttgaactctatggttccttctgaagaaactgctttctttcttggtctctccctctgtatttaattccatatggtgctcagttcttagtccatatgggtcagaggggaagcctccatagtccttagtcctgacgtctagacctgtttatgttccaccccatttcctgtgcgtggaagacctgctcaggagatggaaacattggctgctgctccttggcatctgctgccccaaacctcatggaagagtctccagccgtctccgcctgtcgaggtccctcggccatttcttccattctgcttttgccactttcatgggggtgtgtgataagcgagtgggttctatcttctaagattgttctcagcataaccgtaaagacacctaacaaaatccttctgtcattgatcctcagtcttacatggggtgcgtattctgtttttccaggcttcagcacagaaatacaagtactgcatgttgtcacttacatttggaatctaaaccaataaaactaatagcagcaaagagtagaatgtgggttaccacaggttggggactggagggaatagggagatgttggtcactgggtgaaaacattaggagtaaatgataggtttttgagatgacttatatggtaataggcttgtttccatcagtccatattgtatacctataacagaatatcagtttgtttcctgtaaatatatataactataatttgtcaatatagaatttttttaaaaatcatattccagttcttattgtgttggttctaaataaaaatgcttctttctcttaagacaaaactgtttattattccacggacaataattttttttttaaatgaagtttcgctcttgttgcccaggctggagtgcaatggtgcgatctcggctcaccgcaacttctgcctcctgggttcgagagattctcctgtctcagcctcccgagtagctgggattacaggcatgcgccaccatgcctggttaattgtgtatttttagtagagatcgggtttctccatgttggtcaggctggtctcgaactctcgacttcaggtgatccacctgctgcagcctcccaaagtgctgggattacagacatgagccactgcacctggccaataattttttttttaagtttccacacatggccttaaacaagaacattttatatatgcagttattcctctcaattcattttatcataggctgctagaatatcttattagttgattttcataaaatgaatacattatggttttcagcaggtattgtgaaatataactgtcaggccaggtatagaggctcacgcctataatcccagcacttggggaggcagaggcaggcagataacaaggtcaggagttcgagaccggcccgaccaacatggtgaaatcctgtctttactaaaaatacaaaaattagccaggcatgatggcacatgcctgcagtcccagctattcgggagactgaggcaggagaatcacttgaaccctggaggcgggggttgcagcaagccaagatcgcagcactacactccagcctggggagcagagcaagactctgtctaaaaaaaaaaaaaaagaaagaaagaaatataactgtcatgtaccacttactaatgctgcaaaattatctgctctgtgtggatatagatagttatataacaagtatttcaacacatttttttctgacatagttttattgaatgttcattttcctagtgctatgatggttttgcagttcaaaattcccgcttcttaattatgtttcctgtgagctctttgccattataatatattatgttgtactttagtatgtatttgtacataatgaatatgctttaaatgtgtataacttatttttcttcaattgagatagccatatgtttttggccaattggtatgtgccgtgaggtcagcgtggaaaaataatcctctgatggctaacataggattcacaacgtgagtgttttggtcataggtagtttgaatctaggctgcccgattttttttttatttttttattttttaagacatctcactgtctctaaggctgtagtgcagtggtacaatcatagctcactgtaaccttgaactcttgggctaaggcaatcctcatgcctcagccttttttttttttttttttttgatgagacggagttttgctcttgttgccccaggctggagtgcagtggcgcaacctcacctcctgagttcaagcaattctccttcctcagcttcccaagttgctgggattacaggtgcccattaccacacccagccaattttttatatttttagcagagacagagttttgccatgttgaccaggctggtctcgaactcctgacctcaggtgatccacccgcctcggcctcccaaagtgttgggattacaggtgtgagccaccgcacccagcaccctcagcctcttgagtatccagaattgcaggcacatgccagcatgccaaactaatttttttatttttattttttgacggagtcttgctttgtcgcccaggttggagtgcagtggcacgatctcggctcactgcaacctctgcctcccaggttcaagcaattctcctgcctcagcctcctgagaagctgggactataggcgcatgccaccacgcctgactaatttttgtatttttagtagagatggggtttcaccatgttggccaagctggactcaatctcctgacctcatgatccacccaccttagcctcccaaagtgctgggattacaggcataagccaccacacctggcctaatttttaaattattttgtttttgtagagatggagtcttgctgtgttgcccaggctggtctcaacctcgtggcctcctgtgatcctcccaccttaggctcccaaagcattgggattacaggcatgagccacaacagccagcccttcccaaatatttgaattacatgtaactgcattttctttgttaaaaaatactacttttggctgggcacagtgactcacgcctgtaattccagcactttgggaggccgaggcaggcggctcatgaggtcaagagatcgagaccatcctggctaacatggtgaaaccccgtctctactaaaaatacaaaaacaaaattagccaggcgtggtggcgggcgcctgtagtcccagctactcaggaggctgaggcgggagaatggtgtgaacccgggaggcagagcttgcagtgagccaagatcacaccactgcactccagcctgggcgacagagcgagactccgtctcaaaaaaaaaaaaacatttttgttcctaacaattgaaattcacagttctgaagttccaaagtctgttcaatataagtattacttttggtggaatatgttttcaatgtaaaatatttatttctatactgtaattaattggaaattatgtggttctttatatcttgtagatatccctcctaaatgtacaatcaaggatttgctaccaaaagagaagagcagtacagaagcagtattccacacagtggtgttggaaagacacgaaagccctgacattgaagacttttccttcaaggaaccccagaaaaatgtgcatgattttgagtgtcaatggagagatgacacaggaaattacaagggagtgcttatggcccagaaagaaggtaaaagagatcaacgcgacagaagagacatagaaaacaagcttatgaacaatcagcttggagtaagctttcattctcatctgcctgaactgcagctatttcaaggtgaggggaaaatgtatgaatgtaatcaagttgagaagtctaccaacaatggttcctcagtgtcaccacttcaacaaattccttctagtgtccaaacccacaggtctaaaaaatatcatgaacttaaccatttttcattactcacacaaagacgaaaagcaaacagttgtggaaaaccttataaatgtaatgaatgtggcaaggcgttcactcagaattcgaaccttacaagtcataggagaattcatagtggagagaagccttacaaatgcagtgagtgcggcaaaacctttactgttcgttcaaatctaactattcatcaggtcatccatactggagaaaaaccttacaaatgtcatgagtgtggcaaggtcttcaggcacaattcataccttgcaactcatcggcgaattcatactggagagaaaccttacaagtgtaatgagtgtggaaaagcctttagaggacattcaaacctaactacccatcagttaattcatactggagaaaaaccgttcaaatgtaatgaatgtggcaagctcttcactcaaaattcacaccttataagtcattggagaattcacactggagagaaaccttacaagtgcaatgagtgcggcaaagcctttagtgttcgttcaagcctagcaatccatcagacaatccacactggagaaaaaccttacaaatgtaatgaatgtggcaaagtctttaggtacaattcatacctcggaaggcatcggagagttcatactggtgagaaaccttacaagtgtaatgaatgtggcaaagccttcagtatgcattcaaacctagctacccatcaggtcatccatactggaacaaaacctttcaaatgcaatgaatgcagcaaggttttcactcaaaattcacaacttgcaaatcatcgaagaattcatactggagagaaaccttacaagtgtaatgagtgtgggaaagccttcagtgttcgttcaagtctgactacccatcaggcaatccattctggagagaaaccttacaaatgtattgaatgtggcaagagcttcactcaaaaatcacaccttagaagtcatcggggaattcattctggagagaaaccttacaagtgtaatgaatgtggtaaagtcttcgctcaaacatcacaacttgcaaggcattggagagttcatactggagaaaaaccttacaagtgtaatgactgtggcagagcctttagtgatcgttcaagcctaacttttcatcaggcaatacatactggagagaaaccttacaaatgtcatgaatgcggcaaggtttttaggcacaattcataccttgcaactcatcggcgaattcatactggagagaaaccttacaagtgtaatgagtgtgggaaagcctttagtatgcattcaaacctaactacccataaggtcatccatactggagagaagccttacaaatgtaatcaatgtggcaaggtcttcactcagaactcacaccttgcaaatcatcaaaggactcacaccggagagaaaccttaccgatgcaatgagtgtgggaaagccttcagtgttcgttcaagcctaaccacccatcaggcaatccatactgggaaaaaaccttacaaatgtaatgaatgtggcaaggtctttactcaaaatgctcacctggcaaatcaccgaagaattcatactggggagaaaccttacaggtgtacagagtgtgggaaagcctttagggtaagatcaagtctaactacccatatggcaatccacactggagaaaagcgttacaaatgtaatgagtgtggcaaggtcttcaggcagagttcaaatcttgcaagtcatcacagaatgcataccggagagaaaccttacaaatgagtgtggtgaggtcattaggtacaattcactcctttcacatcagttaatttcattcttgacagaatccttacaaatgtagtgacagtggccaatccctcatgagttgaagcattaatagatatgagaggccataagcaagagacatcatgtaaacatatgtggcagagggtctatccaggcctcgcaggttactaggcatcaagatttatatctttgatgaaacgaaacaaatgtaatatgcatcctgaggccattacccagtgaccgatggtaagtgaggattcctaggaggaataacagtctctggtttccctgtttgcctttgatattatacactgtagaatactcacaagtccaaatatgctaaaaattatatatttttaactcacatacgaaaaggttgcaggatatttgtaggcagtcagttaccttcaccttatgaaatgtttcactgagttatttgaggttttttggaaagcctactattgcgtttcaatgtgaactttgaaatcttattgtgcatccttacacaccttccatggtgctttcttggaaagatcattgggatggaaggatcattgattgggtgaagatcattgattaggtgaaggattatttctatccaatttgtgaagaaggaggactttgcttttaaaattaagtatcatctgaattagcatttgggagtggcgaaaaacaatgtaaaactatgatgtcactcaccattctgataatgttcagggtgcctttctcctaccaggagagtactgtggcttagaggaaagaaatggtctatcaactgaacatgaaatggagcaggccaagaccttaggacattgggatttttgtgggaggagagtaataggtaattagacactgattgtgtggtagaaatactgcaggggaaaaggtcgccctcttatgcatcaaagagcaatacctgttgtttagcaaagagtgatgaaaaattgatcttgttttgaaattgaagagagaggccaggcgcggtggctcacacctgtaatcccagcactttgggaggctgaggcaggtggatcacctgaggtcgggagttcgagaccagcctgaccaacatggagaaaccccaattgtactaaaaatacaaaattagccgggcgtggtggcaggtgcctgtaatcccagctacttgggaggctgaggcaggagagtgcttgaacccaggaggcggaggttgtggtgagccaagatcatgccactgcactccagcctgggcaacaagaacaaaactccatctaaagaagaaaaagaaaaactgaagagagagtagttgtcagagtgaagagtttaatcaacagaagtagagtaacatattctttagtagaactcacattatctgcttgaagcacattttgctaatgttttattcagaatgtatcatagatataatgttttaactaataaaatagaatggtttttctctatgaatgaatcacattctttctgccaacatagttttatcctgtctcagtaggatactccataacacaatagcagtacaccactaggctcttaaacgatcaagaacaatttttttcatggtgaaatcaaataacgcagttttggaaacctataaccgcattttgtgcttgaattacgtgccccacactgtggcttaggatacttattggggtataatgaaaatcttactgaaagttaatttcacattcttacaccccaaaatctgcattgccattgatgcatatgcaccacattattatatttccacatcagtttcttgtgtgccaaataagacccatgctttgcatcttggtttccatgaagtgaaaatacatagtaagaatgcgagaaatataaatcaggccaggcacggtggctcacacctgtaatcccagtactttgggaggccaaggcaagcagatcacctgaagtcaggagagaccagcctggccagcatagtgaaaccccatctctactaaaaatacaaacttagctgggcttagtggtgcatgcctgtagtctcagctacttgggaggctgaggcaggagaattgcttgaatccaagaggcagaggttctattaatggagatcattccattacactccagcctgggcaccaggaacgaaactcgttctcaaaaaacaaaacaaaaaaaaaaaaaacgttggctgggcatggtggctcacgcctgtaatcccaacaatttgggaggctgaggcaggtggattacttaaggtcaggagttcaagaccagactggccaacatggtgaaaccctgtctctactaaaaatgcaaaaacattagctgggtgtggtggtgcatgcctgtaaatcccagctacttgggaggctgaggcaggagaatggcttgaac

SEQ ID NO: 1138 - DNA, 299 bp, Homo sapiens
gggcacagtgactcacgcctgtaattccagcactttgggaggccgaggcaggcggctcatgaggtcaagagatcgagaccatcctggctaacatggtgaaaccccgtctctactaaaaatacaaaaacaaaattagccaggcgtggtggcgggcgcctgtagtcccagctactcaggaggctgaggcgggagaatggtgtgaacccgggaggcagagcttgcagtgagccaagatcacaccactgcactccagcctgggcgacagagcgagactccgtctcaaaaaaaaaaaaacattt

SEQ ID NO: 1139 - DNA, 179 bp, Homo sapiens
aaaagaataataagacagaattagggagacataacttgctcaaaagtccttaatgcgtaggaaaatatgggaaaaacagactcagtttctcctgctttgcttccataatacaaatacttctgtgattttggatgtattgggttttcctctacacatcaaataaacaattctgcaacaga

SEQ ID NO: 1140 - DNA, 570 bp, Homo sapiens
tatcacacacgcatgactctcccataacctattgagtatgtttacttaatatccaacatattgctattcagtataaattcctgccgcaactttcctcctctgaactgcctgtgttgtttctggtagagaccatgcttcccagcctgcaggctgcaaccctgtgtaagaaataaaggtctccttactagacattttttgacctttggtcagtgctggttagggtttcttggtggacactctgcagcatcctgaagcaatgtagcacatcattgtgagagcactgagtatgctgtttgctcaggtctctcttcttcctataaaaccaccacttctgctcccatgataacacagtccattaatctgtgcatggattgattcattcatgacagcagagctctcatgatccaatgacctcttaaaggccccacttctcaatatggccacaccggggatcaagtttccaaatgagttttgttggggatattcaaaccagaggagtattgtattttattttcaatttccatgtattaattgctagtatatagaaataaagtagtttttgtatgttaa

SEQ ID NO: 1141 - DNA, 1421 bp, Homo sapiens
agtgtcccgaaagacttacaaattcagatctgacttgttcatttgtgtaggggagagttggtggcacacatcctctctgtcactgtaagtatgttccaaatgtcacattaggtccactggcacgtgtaagccctgtctggcatttgcctggtccctgcaggcatttgggttggcagtaaactttcttttctaacagatttctggaaatgtttacatgtagcatataatagaataatagaaccacagaacttccacagtaaagccttccttcttttatgttccaaaagctaaaatgtactaacaacctccaaaaggcactatgacattggagtttaaactttgtggagcaggactcaaagctggacttagctgcttgctaactttgaccttgagtgaagagttagcagatgatttaaagtgtaaagtagaaagaattcatgctggttagcccattaaatacccgttaattaagctctccaaaaacgccattcaaaaatgtatatgataatcaaatatttattgcaatgtttcttaaaatagtgaaaaattagaaaacattatagggggctagtgttaaatcatggtgtaaccagaaatgaaacattatgcaaccataaaaaggagttctgaagagtagttcccggcatgatataatgtgaaaaaaagcaaaatacgaaattgtgcaattctaattttgcaaaaactttcagcgtacacgactatcactgtataaagtcacaaagtaggaatggtgattgtatcttggagtgatgagattataagtgatttttaattttcttcactatgctttactgcaattaaacatttacaattcaattttatttaacaaaaatatataaaacttctcaaatggagtaacttcagtaccagacatcctcaacctgactgctctggaggttattgtgcagagcaatctttgaccatatggtcacagatccagaagccagacgtctgtggggctttgctcctgagactgtgacctttgattcctgcactcctcctcttgccatctgacgccggtctgcgcctgtgactgagtgaaaatcgtcataactgtactcggaggttaactctggcatgactgggatggaatcccaggcaacatgctggaggcaggaaagaaggccagccggcaagtcagaaccaaacaccctggacggcacctttccttacaaatgcggttcacaggacccttggggatcctctgcgcacactgaggcaagcagcaatggaagaaattatcttccactcccttcttgttgaaaatgtctgttttccagaaatgaattacagtaatagattatgaaaattgtttccattgcctacataacacagcagggaattctaaaatttcaaaacatgtaatatactcaacctgtgcttgagactgtagggtatta

SEQ ID NO: 1142 - DNA, 2074 bp, Homo sapiens
cagatagtaaagataagacttctggagtccggaatcgaaaacacctttcaacacgtcaaggaacttgtgtctgagaaatggaaaccgctcctgtatattctgtactgttttacttcgggcttctgttaaagctgttctatggccttggattttatggaggcagatctctgtatcatccagagcctgagtacagtttccttccaaatggacaatgacccaggtggccaaagaatgttcatgagttttataaaagtattgatggtcacaggtgataaagtcagtttttaccactatcttaggcttattatagctaacattaaattactctggaaaaagatgtatattgtttcttaatgaagatgaaaaatatgtaattcatataaatcaactgtttatatcccaagacttgaaagaaagacattttttaatgcctgaatgatgagaattgtacagtttttgcctcataagcaaacttgaatcacctgtgtatgaacagggaatgaacacattgcaatggctttaaatgctcttttatctcgttgtaaaggtaaggcaagattttgatgtagtaggatgtaggtaatgtatttaaatatttcatatgaccatatcgtgtccaaactcagtctgagaatgtgacagctttccgcctaactagaatgcagaccagaatgagttcaactcattctgtgcaacttcacagggggtttattagaatgctcagtgtagaggacattcctgtcatccatgccaactacctaactcgttatcagagctgatagagcatggaaaagtctgtccagcgatcagttgttcccctccttccaaaaacagcctccaataccacaacctgaaaagagccgaaatggttattttacagcatacaagcttctgctccagtatgataatttttaattgcctaagaatcattggatcagacctaaatgatccatctgcatttttataagaatggatctttctttgcccttcctctcctagctgctagattttaactaccttttacaaatgttacaaaatgtattttagaggcgacatctctcaagatgacctgagttccttcctgccaactgttccacctagaatacaagtagagaagagcactggctggcaagcatcaacaggagtcttcttcccaacacgagcgcatccatgtcctgagaaaaagtctgtggtttagaaaatatgtccatggttgcccacagtcagcacactcttagtgactcaaaattctgaattatggcagaaaggaaaaataaaacatacttcacattagaacacagaatcatttacatcctaatactgaccacagttcactaaagctcagtagcattaacagatatagtttggaattgcagtttcctcacttcagggtgacaagatatgtataacagtgacagaaatctccaaagctgctgtatatgatatagctttgttaaatatgaaggtcctttaaatacaattgatgtttagtactatatatgtacttttcacattctttggatttctggaaggttatgacactttactgtttacagctaatgcatagttacttgcatgccatggttgtacagtagcagactatgaccctattgtgatattaagtgtttatttcataatgccatttatacatagctgaatttgatgaggattgaatgtcatatataagaggaatgatcatacaatatgtagttgcatcttatataagatttctaggttgcatctaaccatgactatgtcattattttgataattaggcatttatgaattatagtatatattcctcatgttggcatgataattttgctattttccatgcattaaaaataagacaaattcttagagtaattttagtaattttatctataatctgtggggtttttttggagggggaggccactggttgtttctacttccctgtgatattttctctctcattaaaggaatgagctaagtttgtaaatatctcctaaaaacaatcaagtaattttattagcttcttttggaccctctaaatattgacttctctcatgaaaaaataaattgatgaaactaa

SEQ ID NO: 1143 - DNA, 1037 bp, Homo sapiens
tgtattttagaggcgacatctctcaagatgacctgagttccttcctgccaactgttccacctagaatacaagtagagaagagcactggctggcaagcatcaacaggagtcttcttcccaacacgagcgcatccatgtcctgagaaaaagtctgtggtttagaaaatatgtccatggttgcccacagtcagcacactcttagtgactcaaaattctgaattatggcagaaaggaaaaataaaacatacttcacattagaacacagaatcatttacatcctaatactgaccacagttcactaaagctcagtagcattaacagatatagtttggaattgcagtttcctcacttcagggtgacaagatatgtataacagtgacagaaatctccaaagctgctgtatatgatatagctttgttaaatatgaaggtcctttaaatacaattgatgtttagtactatatatgtacttttcacattctttggatttctggaaggttatgacactttactgtttacagctaatgcatagttacttgcatgccatggttgtacagtagcagactatgaccctattgtgatattaagtgtttatttcataatgccatttatacatagctgaatttgatgaggattgaatgtcatatataagaggaatgatcatacaatatgtagttgcatcttatataagatttctaggttgcatctaaccatgactatgtcattattttgataattaggcatttatgaattatagtatatattcctcatgttggcatgataattttgctattttccatgcattaaaaataagacaaattcttagagtaattttagtaattttatctataatctgtggggtttttttggagggggaggccactggttgtttctacttccctgtgatattttctctctcattaaaggaatgagctaagtttgtaaatatctcctaaaaacaatcaagtaattttattagcttcttttggaccctctaaatattgacttctctcatgaaaaaataaattgatgaaactaa

SEQ ID NO: 1144 - DNA, 680 bp, Homo sapiens
tcacctcaaatcccactgggttcttaaaacttgaaaattcaaattgtagagaattatgagacacaatgtgatgtttagttaaagtcatgctatacctttctgggccacatattgctaactctgtggctaattatgcaattaattctcaacgtatcaaagcttttcactggcagtaaattctttgccctcaggtgaagtggattgaaaagacatcaaggatcaaggataatcactttgaatctgttggtttttccccctacattccagacactttaaatttggatgctttcattttttttaaatcaaaccacacaaatatgcagatactttcccagaatttcgcagttaaatggctgatcctcttgaaaactaaccttaatggaattctaaacatttcagtttagaatgactttgaaaaattccttagatttttaggatgttttattctgccaagtatgaaaaaaaaatggttaaatacaatggagttttaaaaattaacctggggattctatttgaactagaaaattcctattggaaaagaatttgcacatacttacagattcagctaataaattttaagaggattaggattctcataattctttaaatgaaaatttgttttagtgatacacagagatgccgtatactatagtgttatgttcagtaggaaaacttcaaat

SEQ ID NO: 1145 - DNA, 680 bp, Homo sapiens; identical to SEQ ID NO: 1144

SEQ ID NO: 1146 - DNA, 1230 bp, Homo sapiens
ctcctctccaggcccattcgtcaaagaatttataacagcttcagtggattttacctgcttttctactttctataaatggaatcacagggtattgtggtagatggaccacagatttcttccattcctgtatgcatgaccctttgcaatgtgacttctactcagggagaggtagggtctattttcacacccttgaatctaggctggccttttgacttatggggtgaccaatagaatgcagagaaatggacacgatgaagctcctgaggctgggcccttgcaactcttgatagttacaacccttagttttaaaactttgcagcttctactttcactctcttgaaatgctgcccccagactgccgtgtaaggaaggtggtctaggccacctgggaaagaactgagcatcaccagaatgaggtcacgtgagggtacctcagaccttcccacccagccaaatctgcatctgagtgcagccttatgactcaactaaggtgaaatcagaagagaaattgcacagctatcccatcttctcatgagaagtaatctatctgttgttttaagacattaagttttgggatctatacttgttatgcagcgaaacaagtatagattagtgaaacaagtatgtactcttattttggtcaggcttctgttgctcaacacgtttgtaagattgttccatattgctgcatgtagttgaataccattcgctctcattgctgtatcctattccattgtatgaaaatattgtaatttatccatttaattactgatggacatttgggggtagtttctagtttgggacccttacaaatagttctgctatgaacatcttaataacatgtcttctggtgaacatccacaatacctgtgtttattacataaatagcagaggacttgctgggccgtacataggggaattcacatgatcagttttagtatatactgtcaattttccaaagaggttgtaccaatttacttcccagcagctgtgcagaagcattagtagagtttcagttgttccacgcccttgtcaacgctttgtgcccttgacctttacaacactccattttaaagatgagtgtgtagatgttgaaaagtgcacaaggggaatgtttgctccatgagccaatcacggaaggaagctgggccagctggttttggcatctaccttctccctgacagctccagggaagaggccagactttaacaataaaaacttctatgtgta

SEQ ID NO: 1147 - DNA, 243 bp, Homo sapiens
tttttgaaatagagaatacattcacaaagtaataatcaagagtctaaaagattatacaataaaaattcttctctcgtccctgtctgccttccatctggctccctccagaggtaaacagtgtgaccagcaactagtgtatccttttagagactttatgcacatataagcaaatatatgtttgttttttcctattatcacttttacaaccaaaatacaataaaactaccttgattttgaagaaaa

SEQ ID NO: 1148 - DNA, 525 bp, Homo sapiens
ggtggataagcccttggaacctggccaattgcatatttaaaatttaaataaatgtatacatttacttacatatttatgatttaaatatatatacttgaggggaaatggatacttattattaatgttcttcattttggcacagaaaagtgtagaactcgggtcacttggtgtttttataatccaacagtgagataaaaactatttccaaatggccttctgaaaacataattattaaagagcagctttattattagtaatgtagtagactgtggcaggtgcggtggctcatgcctgtaattccagcattttgggaggccgaagcgggcagatcacttgaggccaggagtttgagaccagccagaccaacatggtgaattcctatctctgctaaaagtacaaaaattagccagatgtggtggtacatgcctgtgatcccagctactggggaagctgaggcaggagaatcccttgaacctaggagacagaggctgcagtgagccatgatcgcaccactgcactccagcc

SEQ ID NO: 1149 - DNA, 443 bp, Homo sapiens
ctggcattacaggtgtgacccacctcacccagccagagtctggtttaaagagagtttattcaagcatagagtttaaggacagcctcctgggaaacacagattccaaaggatggaagtcagtgttttgtgaatgtgaagtttggattgtttatatagacagattggggaagcttaacagaatttcaacatctgtctctccagggtcttattttttgtgtaggctgtagtccagtggtacaatcatagctcactgcagcttctaactgccgggctcaagggatcttcctacctcagcctcctgagtatctgggattacaggtgccaaccactacatccagctctatataaggcttaatgcatagttacaacaatctgattagtcaggtggtctttttctttcaggaaaggtgtatttaatactacacactgaagatgtagcagtc

SEQ ID NO: 1150 - DNA, 443 bp, Homo sapiens; identical to SEQ ID NO: 1149

SEQ ID NO: 1151 - DNA, 149 bp, Homo sapiens
cctgtaatcccagcactttgggaagccgaggtgggcggatcacaaggtcaagagatcaagaccatcctggccaacatggtgaaacgctgtctctactaaaaatacaaaaattagctgggcgtggtggtgcacgcctctagtcccagcta

SEQ ID NO: 1152 - DNA, 149 bp, Homo sapiens
cctgtaatcccagcactttgggaagccgaggtgggcggatcacaaggtcaagagatcaagaccatcctggccaacatggtgaaaccctgtctctactaaaaatacaaaaattagctgggcatggtggtgcacgcctctagtcccagcta

SEQ ID NO: 1153 - DNA, 1896 bp, Homo sapiens
ccgccgagcccgcccctccgccccagcgcggcctgtcaccgcggccccaggtcgggggtgccgcagggccccggggaccggaggggcgcgcgaggagtcgggcgcggccttggggccaggcccgtccctctttcacatgaagcccgggccgggcggggtggcgggcgcgtgaatcctcgcagccggccgggtcctcctggcgctcctcggcacttctagccgctgcaaccccgaggcccgcgggaactgggcaggaaaggaggaagcgcgggcccgcgtcgctagagaccggagaagaggcgggagtggcgactctgcggacaggggcccgagcgtcctggtcgttgttttcgtcgccccgcgggccgtgcaacccccgaacgctggcccagcggcccggcaccctcgtcaggcgccgccgctgagggcaggcagcccggcagccactacacacggacccgtgacgtcgggcgtagcgcggcgcacgtcacggccgctcgctcgtgcgcgcgcaccccatcgcccggcggtagcggaaaccccccgggcgcgcgcccggcccaggggagtgggtcggcgcctgcgcagaggcccgccacgcccacacacaggccaccgcccccaccggcggacggcgcggggattcccagtcctcgtccgccccgcctcgccccgcccccgcccctgccccggggcagcctgtgctgttccgtgtgcgcggcgcatacgcacctgggttgtctcgagcctgcggtagtggccagatcccagacatccgagtagatcccgtgaaaaggtctcccacgtgggctgtggacagggcccaagggtagcagagctagcagaggcagtgacggactgtgtggcaggtcatttgcaaggagaaaagccgtctgcctcttaatttgtggctcaagtttcagaatttttttcctgagggactttagaaattacttcaggcttgccacctaaccttaaaccacccccttggagactggctaagtgttatttgtgttttctgtttagttcttatcaccatcgatacttggttatgactggttgtgtacattggttagcccagcaagtattacttctccagcttaacagatgtggaaacttaagcccagagacatgagttgacaccccacccccaaagctagagtctaaaaccctttctttcgctcctcatctcccacaggataaaatgcaaattaatcagactagtggtgaggccctccgtggtgtgactaacctgcatcccgacgttttcaccctactttgatccagaaagcacctttccgccccatctcttctcctttccttaaataccccttacaacttcctgtaccattcttccctgttcagcttcttcttggtttcttcgtacattctggatccacccctttcatgcatattccagaccacatttccactggagcagttgaaatgagagagatgggaatgggactcacccgaaccagaggtaaggagctacccaacttgggctctgagggtcaagggagctggcacttgtggggcagagactgagggagaaactgttgtgtaatgtcaaaatatctctgggtttcttccaggaatttttattacagacccattaacagaggtgtcaaagtcacaggaacaaggatgtgcacctcagaaacacagaggtcagtggaaaatcagtttgcttctatttgtttaaaaaatgggggacttatgcataaatctaagaccttcttgaatctaacattctaagacctgtatgccacagaaaggagggtctcagaacgccggaggatagtatttaaatcttaaatatctatattgttctccacagttactgggtcaccacatagcaggcattcaataaaaacgtgtttgtttactaagtaa

SEQ ID NO: 1154 - DNA, 238 bp, Homo sapiens
caaagacaagcactttttcgcttactgcatgtaccatttctgcttcatcccaagaccagatgcaacctttcttctaaaatctctgcagggtacgtgtctgacagctaacacagcccagcagcctacttcgcgctgacctgggctttaggactggatgcagggggcccaaggtccgccctcccgcagctaggcaatcacccagcgaaatctccgcccctggagcgcgcttagccgccgc

SEQ ID NO: 1155 - DNA, 3473 bp, Homo sapiens
ggtgaaaccccgtctctactaaaaatacaaaaattatccgggcgtgttggtgggtgcctgtaatcccagctacttgggaggttgaggcaagacaattgcttgaacctgggaggtggaggtttcagtgaatggagatcacgccactgcactccaatctgggcaacagagcaagaccgtgtctctaaataaacaaacaaacaaacaaacaaaaaattggccgggcacggtagctcacacctgtaaccccagtactttgggaggctgaggcaggcagatcacctgaggttggaagtttgagacaagcctggccaacatggcgaaaccccatctctactaaaactacaaaaattagccaggcactggtggtgggcgcatgtaatctcagctacttgggaggctgaggcaagagaatctcatgaaaccgggaggcagaggctgcagtgagccgagattcggccattgaactccagcctgggcaacagagggagattccatctcaaaaaaaagagaaagtttgtctgggggtggtggctcacgccagtaatcccagcacttggggaggccgaggtgggtggatcacgaggtcaggagttcaagaccagcctggccagtgtggtgaaaccccatctctactaaaaatacaaaaattagccaggcatgttggtatgcacctgtagtcccgctgctcgggaggctgaggcagaaggatcgcttgaacctaggaggcagaggttgcagcgagccgagatcatgccactgcactccagcctgggagacagagctagactctgtctaaaaaaaaaaaaagtttttgtattttttttttgtagagatgggatcttgccacattgcccaggctggtcttgaactcctgggctcaagcagttcttttgctttcgcttcccaaagtgctgggattctgcttgtttttaaaagagaaatagcagtatagtattggggtaaacaggacaaacttaaaccacataattttattcagtccttactctgaggaggaggaaatatgaatttcctcttgaggaggacaatttaggaatcatgctcttcatatctacactttagagcagttaaaaaggacccaagaggggcatgtcagaccttagtagagtgtgtgtgccattctgttaaccttaacttgaaataaagggagcacataaacttgacaaagccattttccacatttgagaactctcggcttatttgtttaatggcaaatgagttttaaaaggaaataaactccttgagctgtcttttccagtatattgatctgtctttttttgtgaggatacagctaagaaaagaatggacagatgcatactaaatttggccttcggagtaatggatgcagaatgtgtctgtgaagatgtggtcaagtcacaagtgatacgcttaagggacgccctgagatgttgggattgagaagtaaagtttgggggaaatacttgtccctggacgattttgttagttcaatcacttaaccaagttcaaaagcacatgactagcaatttttttttctttctttttttttgagacagagattttgctcttgttttccaggctagagtgcaatggcatgatcttggctcactgcaacctccacctcctgggttcaagcagttctcctgtctcagcctcccaagtagctgggattataggcatgtgccaccacgcacaggtaattttgtatttttagtagagacagtgtttctccatgttggtcaggctggtctcaaactcctgacctcaggtgatccatctgcctcagcctcccaaagtgttgggattacaggtgtgagcccacacgcgcctggccagcagtggttttaaaatgaaatcttaaggaaacctggtattgttttaggaggacagtcaagaaaaaggtgacaaaggacatagggagagagggccaggatctgggaccctctgcccagttgtaatcacagctgctttgctgttaatctattttatatatatgggttttgctttcatagaagttcaagaggctgggcacagtgactcatgtctgtaatctcagcacattgggaggcagaggtgggaaaatcctttcgagccagtttgagagcagcctgagtaacatagcaagcctctgtctcaacaacaaaaaaagccaggtgtggtggcatgtgcctgtaggcccagctactcaggaggctgatgtgggaggattccttgagtccaggaagtggaggctgcagagagctgagattgtgccactgcactctaacctgggttatttagagcaagacgctgttaaaaaaaaaaaatgaagtttaagaaacactgctataggtcatgaagaagctgttagaccattccttgtcatcaggattaatctttcttctgtttcctttgattttttggttaccttgagaacttaaacaaatatgctaaacaggccaacagccttactcacttgtttgttttacatacatttgctctgattcataaatcagatcagattaaaagggttctcctgggactgattccttacctttgtagcaaaggttctcagctcaagctgtaaatgagaattacctgtttaacattttaaagatatccatgactaaaccctcaccccagaaactgcaatttagtagatcttgggtggagacctggcattcatttatattcttcaaaaatctcataggtgattctgatgtgcagccaggatggggcacttctaatagaaagttttctggattttttgagatggagtcttgccctgtcgaccaggctagaatgcagtggcatgatctggtctcactgcaacctgcgccacccaggttcaagtgattcttgtgcctcagcctcctgagcagctgcgactacaggggcatgccaccacgcccagctaatttttgtatttttagtagagatggggtttcaccatattggccaggctggtctcgaactcctgacttagtgatccacccgcctcggcctcccaaagtgcttggattacaggcgtgagccaccttgcctggccagcatgtacattcttatatttatctcattccagccctcacaactcagaacaggtgtcagagacgtttgaaccagagcaactccatcttgaataagttctgggtaaaataaggccgagacctaatgggctgcattcccagacgattacgcattctaagtcacaggatgagataggaagtcagcacaagatacaggtcataaagaccttgctgataaaagagttttcagtaaagaagttggccaaaactcaccaataccaagatggcaatgagagtcatcctaaaaattagccgggcgtggttgcgggtgcctgtagtcccagctactcgggaggctgaggcaggagaatggcgtgaacctgggaggcacagcttgcagtgagctgagattgtgccactgcactccatcctgggcaacagagcaagactctctttcaaaaaaaaaaaaaa

SEQ ID NO: 1156 - DNA, 252 bp, Homo sapiens
ccgggcgcagtggctcacgcctgtaatcccagcactttgggaggccgaggtgggtggatcacaaggtcaggagatcaagaccatcctggctaacacggtgaaaccccgtctctactaaaaataaaaaaaattagctgggtgtagtggcgggcgcctgtagtcccagctacttgggaggctgaggcaggagaatgacgtgaaccagggaggtggagcttgcagtgagccgagatttcgctgctgcactccagc

SEQ ID NO: 1157 - DNA, 405 bp, Homo sapiens
  misc_feature (340): n equals a,t,g, or c
ttgaaacaatgtgtcagagcaaataatgccatgccttgggtagaataaaggtattgctgttcatctcaatgcctacagccagtgtttcttagccatgtgatttccgacgagttattttacctctctgaccctcagtttccatctctctccacagggacttcatgggaattacattaaatgatacttgtaaggagttgggctgtgggagaaaccaacagctagtggctgtaattttgttggtgtgggtgtcaataagatgatggatgcagagcatgtcacacaatttcctgatacacacaggccctctgtaacattggcctgtggcttggactgatacgtnaccttaggagtgcagttgggaaaaaagagcttggattaatccattttcacaccactataaaaaac

SEQ ID NO: 1158 - DNA, 413 bp, Homo sapiens
ttgaaacaatgtgtcagagcaaataatgccatgccttgggtagaataaaggtattgctgttcatctcaatgcctacagccagtgtttcttagccatgtgatttccgacgagttattttacctctctgaccctcagtttccatctctctccacagggacttcatgggaattacattaaatgatacttgtaaggagttgggctgtgggagaaacacaacagctagtggctgtaattttgttgttgtgtgtgtcagtaagatgatggatgcagagcatgtcacacagttcctgatacacacaggcctctgtaacattggctgtggcttggactgatacgtagccataggagtgcagttggagaagagaggcatgtattagtccattctcacacgactataaagaactacttgagac

SEQ ID NO: 1159 - DNA, 413 bp, Homo sapiens; identical to SEQ ID NO: 1158

SEQ ID NO: 1160 - DNA, 638 bp, Homo sapiens
agccccttgagttcagagatcatggtttaatcgtctctgtgtccctaagacctagcgtaaagttgacatgaatgacggctccatacgtgatgtaccaaatgagtgagtgaatgaacacccagtggatcgatggccaggaaaggggccattagaggaagagcccctttgctgacctggcttgagaatccctggacttgttaatgagagtcagtgcctgttaccttgtgaggggtggatttggcctgacctgggaggtgcttacaccacttccctcctctgccaagcttctgtttctgtttaaagcacactgggaaattccagcggtgttttcagggctcctctgaactgtcaggcttagatttttaattttgtggagcaggaaggagcaaatcagcgactcttggctccaaagaaaagccactgcgttcatcaactgcttggcagcttggtgacctttggggcctgaggaagggaaggaaaatgtcactcttccctctttgtgtatctgagatttcaggaggaaataaagagtttagaatacctgaatgtttgcctttcctttcctgtcctatccactttccctcttatttctctttcctttcctcctaggaggccaccagcttcccatgctgttcttt

SEQ ID NO: 1161 - DNA, 638 bp, Homo sapiens; identical to SEQ ID NO: 1160

SEQ ID NO: 1162 - DNA, 351 bp, Homo sapiens
tcatggtagaaggcgatgggggaagctggcacatcccacatggccagcaggagaaagagagagagaggggaatgctacacactttcaaacaaccagatcttgggagaactcactcaccatcacaagaacagcaagggggaaattagcccccacgatccagtcacctcccaccaggcccctcctccaacactgggaattacaagagggcgtgagatctgggtgggaacacagagccacactgtatcaaggcacctgcttggaacccagcaacagtcatttagaataaaattttgattaacaagctactaagatgtaatttttggtttaattttagccatattctctcccttt

SEQ ID NO: 1163 - DNA, 351 bp, Homo sapiens; identical to SEQ ID NO: 1162

SEQ ID NO: 1164 - DNA, 619 bp, Homo sapiens
aatggggaaaaaagttctcaaaataaaaaagagaaatatggtagttttaagatgaggataagctaggcagcattttcaggggcacctgtagccatcgtggttgaaggatttgaattgggaaagttcctttgggtttttccaaaaggtgctgttaccttgtatagatatccacctatctattcacatggaccagcaaacgggacttctctctctatcgatataaatgtctagaatgaacactggatgcataaaataaactgatctgttcagacaactattttcaaatagtttttttttgcatctttcttagaagaactgttttgttaatgctaagaggtaaatgctgcttattataacctataatcacagctctgctttgtagaaaaatcaactttctgcaactcatagatcttgctgaaacactgttcttgtgattttagtacaacttttactttcttttataaagtataaaatctcacactgaagacaacagtagcccttgtgtttgctagtatgggattgtccactaagggacagctaaaagaactgaaatagttaatgcttggagatctgagagtggcaactgtggatgtgattcttttaaggtaaaatcaacagg

SEQ ID NO: 1165 - DNA, 5647 bp, Homo sapiens
aagtttccatcccttcattattgccagcaactgtaagcatggaaacttctgaaaaatcaaagttgactcctaagccagagacttcatttgaagaaaagtatgtcatttattaacagtgcaatataaatgttcaaaaaagtagatcagccaaagacaaggatgtattgcatttatttacagacacaatttttacctagagaagcaagaaactgcaagatgtccactgggggatctgtaatcagttctgtattatggaaataaaaggtgtgaagcaggaaataataagagatcaggctggggaggtagggttgtcaggttagaaagagattttaaggaacttggccaagtgtggtggctcacgcctgtaatctcagcactttggaaggccaaggtgggcagatcacttgaggccaggagtttgagaccagcctggccaacatggcgaaatcccgtctttactgaaaatacaaaaattagctgagtatggtggcacacgcctgtaatcccagctactcagaggctgaggcacaggaatcacataagcccaggaagcggaggctgaagtgagccgagatcacatcactctactccagcctgggtgacagagcgagactctgtctcaaaaagaaaaaaaaaaaagtttagggaacttggatttttatatccgaggtcataggtaactgtcaaaggattgtaaactaaatagtcacagtcacgggctgtaagtgtgtttgaaggatgggtctgaaggggacaggaaaaggatacagtagtttgtctctaagaaaatagaatgttttgccaacatattcccagattgtctagtcttattttaggccaaataaaataggacatttaaaaaaatagaaatagcttcctttgcataattttttgtttttgacttatctgttcacttagaacatatatggtcttttattcgtgaagttaataaataccttttgttctttacattttagtgatggaaacataatccttggtgccactgttgatacccaactgtgtgataaacttttgtaagttacattttattgaatgtgaaaaatgtgattgaggctagagaaagagagttctgttatactaacaattactaatattaacagcaaatgaccgaggctgttaaattactgaataaatcaatgtagctataataattgggtgggggtgaaggtggggagctgtaagtttacaaagaaataatttctgatttgctattatctcatgccagggttttgcagatctcatgccggggttttgcaggtctctagccttgcttcatcagttttcatttgaagttcaatgcttttaattcatttttgcactgacatattttgagtccagtgggaaggcatcacagggaatgatgtgatgcttggaaagctgagatgggtttttttgcactttcagttttatgaactgacctaatatctgtgtttatccaagttaaagtctggattaaattaggaaagtctattttcagagcagtactcaaaaatgagatcttttctttctcactattatcttttactttatttggtagttgatacttctggcaatacacctaaatacagaagaaatgccttttgaaagtttgtaaatgtgcatatttatattattctgtttcgtagaggcaaatacattacttctctgtcactctctctaaactggtcacatatctctaccttcaagtttttagtaacaccagctctatataattgaatattaattatgtgaaagagaaagtctctggatgtttatagtgtctctttgccttcactaggatagcaaatgaattattatgggcagcattagggattcctctactatgctttaattagaactataaaatgaattgctttgccagactcagaaatgtgattcccttgtgaattgaaaagtgaaacttccattctttattttaattagaaggattagatataaatagtacgtgagtatttttaaagttcctagtacatgcagaggatgcagcactagtccatggaaaacactgctttattttcgaatattgacatcacaaggctagtcctaagtgcttttccagctcttctaacatgtgcagaacagttagaattattggcaggacagttaatcacccctgcttttaaaagaactaaatgttgtcatttagtgaagcacataagtgactgcctgattccagattttcttttattgccaggattcaacccacacgcaattttagtttctttccaagatgttttacttagaaacagtggcactggagccacttattattaattgttattactgttatttttagaacttcaagtctgcagaagtccagcagcctgggcaatctgaagaaagagacatctgatggggtgggttctgtgttttttgtttttttttgtctgttatcctgagaaaaaactatttagggatcttcatcttttccctttttgcaaataaaactcttatgaagagcttgtggtttttagtggaaaattattagatgttaggtttaacagtaaatattaagaagtatgaatatgaaggattgaaaatagtatgtaaaaccaaaaatggagactttaataaaacattttggaaaataaacaatactaagattttgtagcttagaagtagatataaaattattttaacttatggagttgtatgtgacaaattcagaattatacaaaggatttccctaacaaccttaaatattgttattgctttgaacaggaaaaggaaactattcagaagacttcagaggtaactttttgtccaaattacaatgcaaaaatatttctacttccattacatgtaaattgcttaaatgtctccagtagataaaaactttcagaacctctagaacattatgctaaatgaagccagacacaaagttcacatattatatgattccgtttatgtgaaacatccagaacagataaatctatagaaatagaatgcagatcggtggttaccagtggtaagaggtgggaaaaatggggagaagctgtttaagggtaaggggttttgctttcgaatgatggaaatgttttggaagcaggtagaggtggtggttgcacaacatcgtaacatactaaatgccactgaattgtgcactttaaaattgttaattttgttatgaatttcacttcagtaagttattaaaaaacaaaaccatagtctctcagtcatgctacttaatgttcctaatgaccataactgagcttccttagacctccccaaaagcccttcttagattaccattagattatacacccggtgcccatctaaagcaaacattttggtatgtttaaagatgtcgtcaacatgtgctcaattcttctttcccctgatttttttttttttttttttttgaaatggtatcactttgtcgtccaggctggagtgcagtggtgcaattataactcactgtagcctcgatttcctgggctcaggtgattttcccacttcagcctttcaagtagctgggattacaggcgtgcaccaccatactcggctgtttttttttttcgtttgtttttttttttattttttattttttaagtacagatgagatcttgtcatgttgcctaggctgatcttgaactcctgagctcaagtaatcctcccacctctgcctttcaaagtactgggattacaggcatgagccactgtgcctgttctgtcctctgattttctgtcattaaccttgtgaagattacagcctgataggctacctccagatccagtctcttgactgttggctcttagtgcctgagtcatatgtggatagaattgacaaagcagccagtggtgacagctataattaaaatccttgttgtcttttcagttcaataaatggttaaatgattttgacgtcattgttgagccatggatgataatatcactaaattgtgccatctgtaaacttttggtttctatgagctgtagatatatagagtaaaataaccacctaaaatacctatatcccctcacccttttctctgcttctgtaaaaaaagaagcagagggcaagaattatttctacttctgcaaaaaaaagaagcagagggaaagaatagagaaatgaaaacaagaagacaaaagtatctttgtataaaggacacccacttcaataaatggtgctgggaaaattagatatccatatgtagaagaatgaaattggacttcacctgtcaccaaatcaacaaaaatcaactcaagatggattaagaacttacatataagaccagaaactataaaactgctagatgaaaacataggggaaacacttcatgacattgatctaggcaaagcatctttgtataaatactaaaataatatactgtgttacagctggctctaattgcccattcaaagaaccaaaaagctcaaaataaagttgctcactgtgccttcattttcttattctttgaggagaatatttaaaataactggaatagaatctccttatactgctggtatagaagtttgaactaatgcctgctttgtagaataattaatattatattaggcttctattgacaaagttataatataagaatatgaactgtattatagctaaatccgtgacataattgttagaaaagtcagaaatctgctgctattattctggttatgtaatgtctccatgtcttttgaggaatgaggcaaacaaaatttaagaatttttgtatcctaaatatttaaagccctagacatatcgattctagattagtgatgaacatgttttccttgttgcttttgttgttgtttcttaagtagctttcagaattgattttttttcaacttctgataaggcatttgacattggtgatcaatgtattagttcagttattcttttgaataaactcatggatgtggcgtgagtgagtatttgctgttagcctggcatgtgctgaggatgctgcacctgagagctgtttcactattcttatttgcctctcaggacagagctccggcagaaagcaggccatttgggacccttcctcccaggcccccagggcaggacacctccatggatgacaaccccttcggcactcgaaaagtcagatcttcctttggccggggcttttttaaaatcaaaagtaacaagagaacagcaagtgcaccaaacttaggtacgtatgaccaaaatgcctttgccctaattcttccacaaggaggaaaagagcagtgtcttcccttcccttactctttcattcattgattcatttctctttctcagaaacgaaggtgaatgacttaggggaatttagcaaaaaatgcctccgtggatttaatttagtgttgtgaagatatatagactctcaccctgctctctcctgtggtataaacttagcggaaagacctaaaatcatgattccctttgacttcatcatggagtttcccatctgttgtgatagtggataaattaacattgacgttgagcctgtgtgtaacatcagaagcactgtgtgccgcatgcctctcctccacggtgtgtatttggcgaggaggagtctgatctgcatttcattttgtcatctctgtgttctctccattgggctgcgtgtgattgtgtgcgttgttgggatatctgaagatcgtaaacgaagtgccagtgcacccaccctag

SEQ ID NO: 1166 - DNA, 389 bp, Homo sapiens
aggagtaaaaggaaaatgacatagagtctgagctagagtaacagggacagtattaattaatattaaccaaatatcaaataagaacatttaagagacgaggccaggcgtggtggctcacgcctgtaatctcagcactttgggaggccgaggtgggtggatcacgaggtcaggagttcaagaccagcctggccaagatggtgaaaccctgtctctactaaaaatacaaaaattagccaggtgtggtggcgggtgcctgtaatcccagctacctgggacactgaggcagagaattgcttgaacccagtaggcggaggttgcagtaagccgagatcatgtcactgcactccagcctgggaaacagagtgagactctgtctcaaaaaaaaaaaa

SEQ ID NO: 1167 - DNA, 722 bp, Homo sapiens
taccctgcataatcaacaagaatgtcagctattccaataataaaatgcttttcacaatcaatttaaaaattgcccattttggcctttctggcagcccacagaatccaccctccgttgtcctcttgtttagagagctggctagctcattcctcaggaatgacccatgtcccaggagctcaggaatcacacatcccctagaggttattctgaagtccatgtggtgctctagtggcagcaacttctccatttgccctctgtgttcctgccattaggccataacccggtctggtcaaagacttgccattttgtttggacaaagttgcaatttaaatgtttggatccagagcttgcagtaggaatgttccagaaatacttagtttagctttttgaatgcaaaggttgaatgcacttggaaaggcctagaatagaaattaagcaagagcacttctttcttaacaagtgatctgttcataactatggatggcagtagagcaagaggacgcaaactggtgaacaaagtcacaaatgccttagaaactaggtgacatttgagccagatgtgaaagagtgtgacttgagaggaattcgcatagaggagaaagaatctagcattaaaatcagacaggcctgagatcaaattccagttttgatgcatattagctctctgaccataaacaagttctttaatctttctatgtctcagtttacttatctgcaaaatg

SEQ ID NO: 1168 - DNA, 321 bp, Homo sapiens
tttttttttttttttttttttttttttttttttttttttgaaacaaagtctcgctgtgtctcccaggctggagtgcagtggcacgatctcggctcactgcaggctccgcctcccgggttcacgccattctcctgcctcagcctcccaagtagctgggactacaggcgcccgccaacacgcccggctaattttttgtatttttagtagaaacggggtttcaccgtgttagccaagatggtctcgatctcctgacctcgtgatccgcccgtctcggcctcccaaagtgctaggattacaggcgtgagccaccgcgcccggcct

SEQ ID NO: 1169 - DNA, 11138 bp, Homo sapiens
cggaggcagagtaagaagactcagtaccgggaataccttgacttcattaaagaagtgggcttcacctgtgggtttcacgtggacgaagactgcctcaggattccttcaaccaaaagagtatgtctgattctcatgttgttctaggcggtgtgtcggtgttcagatggagagctcagggctctgccacagagccatgaaccatgctgtaacgttcaaaatgttctagaacgtgccggtgctgatttctgtgcctctgtcactgatgaggcccagaggcttgttctgtcccatggtgccctccttaaaggcacccggtgctccctcctccaggcctgcaggagtcctcgccaagccctccttgcctctccagaagctctgagtggccccaggggacctgcccagaggaggcctcagtgtggcctgtggctgacctccctgtggaaagttcctgctccttcaagtcgcagataattggctgcgattgaagtgtgtttcagaagttcacagtgatttcccattttctcattaaaggcctagttcattcagattcacctgaaatgtcatttgggcagaagttggcccgggggctttctgtaagcagtgggactgtgcctctgacctttgtgtggacagggcagacttatgccctcttgccgctccaaaggcttgaccttttgaaagtaccgtggaagtgtttacagcagctcacctatgtctctggtaactttatttgacaagactgtggctggcagacagtgtgcttttaaaaaataaccccgtcgtgtccaggccacagaatttgatggctgccttagcaagaaagggcccagctgatctgagtgaagcctcggctctgctgctgcccgtggtgcactcgggctgatcgcggagctccgctaagcctgtcctcacctgtgagaccaggaggaggctgcccgggtctctgtgggggctggacaggatgatgtcttcagagcccacagcggggagggcatgttgtgggcactcgctggccggctgccgtcatagccgtgcaccaggagcagcgttggcttgtggcacaggcctcagggccgctggcgctgtcactgccctgctaccgtgggaagttaccttaggactcgctgctgaaccgtcccgtcatcctctgtgtcctctgtttttggcaagtcttggtcttctgagttcagaattgatttggggaaactgctaaagtttgggtcctctaggcgggtccgaggagcccgtggctttgatttttgcacttgcttctccattactaattggtagagaccgtggactgtcgcttcatctctctgagcttcagttttcttatcactggcaggtttggggatcgaatgtaagagtggatgtgaacgtgctttgtcatttttaaagcagttcacacacagcacatgtctggtggggactgggtgtgtgacaggcactgagaatttaaaatcccgctggaagagctggggagcagaggtgtggctgtcacgtagtgaggaggtcggcttccttatcacccgcgcctggccttgtagttgatgcctggagaggaagcccagaaatgaggtgcccttgctggggctgggcagggcctggttgtccggaggggactgtctgaagggcaccctccatcggggtgtgcggcaaagggaggcaagcacgcatggagcacctctatggctccaggccctctgcgcagcccccgtatgcactcgctggctctggcaaggtggggacaaagctgcctcccttcccagcccctggggcactctgcaactctgcagcgttaccatcagcatgtgcccccgccgggcggccgaggggtggaatgaggggcggcagcgggaaactaggacggtgcggctgccgggcccaggagtgtggactcttgagtttaggcgcctttgttagatcttgtgaaggtccaagatctaacaatgatgagagggaaccatgggctcttactgtttttttaatttttaagttacttatattggtgtcagtttttattttgtatttatttttattgatttatttattttgagatggagtttttgctcttgtcacccaggctggagtgcattggcacaatcttggctcactggcctctgcctcctgggttcaaatgatcctcctgcctcagcctcctgagtagctgggactacaggtgagggccaccacgcccggctaatttttgtatttgtagtagagacgggattttgccatgttggccaggctggtctgaaactcaagtgatccgcctgccttgggctcccaaaatgctaggatgataggagtgagccaccgtacctggctggtgtcagttttttaaatcaggattttttcatgatagacattgaaaacttgtgatttgtactccaggatgagagaattccatggagaacgttgaaatagactagccagctaaaatacttgctttgctttcttcaaacgcaggtctgtctcgttggaaaatccagaacatacccttcctccagagaagcttccgtggatgaaaagaggactcagtacattaagagcaggcggggctgccctgtaagcccacctggctgggagctttccccttctccacgctgggttgctgctggcagtgctggtcactgtgacggtcagcaagctctggacgccagggtcgggtgtgtaaccagggcctgggccgctgagcatggagcagggccccaggctgaaggaccctggctacctggatttcatcccagagaaaaggctgagcgtgtgaggaactgtgccgccctgccacgagattttattgaccaagtggttttgcaagtagcgaatttactgttaggtggaaagcaattaaacacaagaagttctcgaaatgggagtttgaagacctggaatgggggaggtaagctgtccaccatcttagggaggggctagcacgctcccaggcttgagggcaggaattcacgtcttcagaaccgacatgaaatggtgtggccctgtgactacacactttgaaaaagccattgatggtgggtgcataggctctcttcaagcaaattctttaaaattttccaaatagctcttataaacataaaggactttgttatttccagggagtgacagagtttggacccttaattaacttttaccaaacatgcaggtttaggggctagaactactcattttcaatctagaaattatccaaagagaaaacaggttactgagtgcaagcaaaatgcactgtccccttgagtatgtggtaagatttggagctgttgtgattcgataatttaattctctttgaaatccccaaaacacaacaatcatccatggcaaaaggagaaaattacatcgattgttctcatggggtgagtggtgtgctgaaattatgttctcaggtgagtggtgtgttgaaattaacggcattcagagagccagccagggctgtaaggacctcgcctccttccgggcagggatgctgcttggccgccagagggtggtgtagagctgcagccaacgcctggcttctcttgcagttttgggaactggagaagagcacggagccccatcccctcccggcccctccgtcggtgacttctgcctggctgcgcatttgagggaaacccttcttctccaggctttgctttcctcacctatgaatgttgggacaaaatcatacccgtttccttcttcatcctttgtcctcttgtaccatgtgtacgtgggatgggaccgggccatggagcatagacggcccctccagaaatcattcgaacctgatggtacctggtcagcagagcctctagccatctggcgagagtggccctggctcagtggctgatggggccgactagctgcaaaccaccaggcaccgtggggcctctgggttggccctgctgactaaaggcaccctgctgtggtggggctggagcacagaggaagaaggctgaggctggcagagcatggagcccaccacaggcaactgggacccagagccccagggacatcagtgtggtctgaaagttcccacgtgcagtaaacagtgacagttcttgagtgcagtttgacctttaaattcccaggagatgacgggcacacagatgtcagctgtgcctgggatggacggctttcggtgggtgaggaggaaggaggaacagacctggagatggagagcggggatgggtgagcggtgggctcagtcctgcctgcgccttggaacttgggaatcagggcacctaacaggctctggacccccgtcccctccagatgggtgtccgtgggtctggggcttgttagggactctccacgtggccttggcctctcagcccactgcctccctcccgcccacaggcggccttcagggcctttggtcgcccccacccagcctgtcctcaggcaggcacctctgcgtttctgtgcctgtgggccatgtgtggctctgtctccaggacctcacccatcctagctcggcgtctgtccctgtgggacactgctgagaaatagggtaggaaagggccctgccctcaagaggctccaagtcctgcctggctaggagtcaagaccgcacacgtcaaaggatgagaaaccaagaggccggatatgccaggccaggaggcacccatggctgagtgtgagattccctgttatggagtccatgctgggccagagccggggcaacagggaaggctgactgggacaatatgtgatcttttttaaaacactcccgctcctctcagaatggatttgagacagccgagaggtggactcagaaggttggccaggctgggtgggcaggattctcgcagcagctgcgacagcggctgccagcaccaggctcctgggtcaggagtgtggtgtcctgatccgtaggggtctgacaggctcagctgcatacagacaggcgccgtctcctccgctctcctgcagcttgggagggtgtggataagatgtgaggtgcagcacctggcagataggaagttcctggcaaatacatgcaggaaaaccagctttcattcatatccaatttgatgttttggtaataaatgactttaatgtcaccaggttttctgattagagcattttgaaatacctgcaggctctcaaagcagaaattcgaatgggaaagagaccatcactgtggtgtctgtgctgttcctttttttagtgcctagcatggccttgctggccaccctagagccggtagcgccagggctggctgccccatggttggagcagccactgggaaggctcaggccccaggcttgccagcttggccttccttctttagtctgagaaaccctggctccaaacagccaccccccttcatgggtcaccagtgagaagagcttgaggtgaccacccagagcaggcagcatcacctgacgcctggccctgtgcgggcatggggcatgtgtggggctgcgtcttgtcaggctgtgccaccttagctgggtggggacgccacggccctcacggtttggtgcggtgtggtgtgggttaggtgagatggaatcgtccttcgtgctggagtgcataacgcgtgtgagtgtatggaactgaaatggactgtttctgcctgtgtgacaggttcgtaatattttgctgttgttttggggaaaaaaaaaacccgtttttccacagagagcctatctctggcagaagtagccaacgagctggacacggagaccctgcggaggctgaagcgggagtgtgggggcctgcagacgctgctccggaacagccaccaggtgttccaaggtacggagtccgcctctcccccgccgttctttccttctttttcccccttttttcagttaaataatgttttattttagagtggtttagactcactgaagaatctgacagaagcagcaagttccgcggtgccccacccagctctgacgtgggtggcatttgacctcagggtgggacgtgggtcaccccgttccctccttgctcctctggacctcgtcccatgcgatgtccccaggctggtctctctccccctatgctgtgcttgctgacgcctcagctccacttgctccacgcaggacagagcaagtcgggtagccgctggccggtcccctgttggctgggggtcattgtttggcgtcatctttagctgctgcaaactgaaagcatcctgagccacagagccagggtggggagtgggaagagtgagccctgccccacaggcggaggcctggactcctgtggccctcgccccacgggcctgggcaggcggaggtcctggtacccagttcccctgctccccaacgccctgtgactccaggactgccagggtatggggaggcaggagggccctccacccgcttgtccattcactcagcccgcaaagcaaggcagacacatccctggccttctggagccggtggtgcagtgagggaggggggagatgtagcaggtgctcacccaggtgccagtggtgtacacacttccatcatctgcagcttccaggtgtgcacagagggggcaggaacagggcagggagccatggtttaccagcgccagcggctggggagtttgccataacttgctttgtggcgctttttttttttttttcctctttctgtaagtattttaaagcaaattctagctagcatgctatttcacccctaagtacttccacgtgcatctttaagaatagtaggtgtcttcttgtgtcaccaccatgccctaagcacacatttctgtgagttgtgatgtgcagggagaactggcctggcccgagtgggctcaggagggctttacttaggaaatgacacttgagctgggcctggaaggaaaagaggagtcaggaacagagaacagctttaggcagagcgaacagcatttgcaaagagccagggttgggaggagtaagagtgggagctggtcgggttacagccgccatgaccaggaaaaggactgggcctctgatgggtagggatgacaccgaagtcacagtgggaaggagtggcctggcttacaccctagcttctgggtcccctgcccatgaagtagccgtggggatcaggtgcagtacagtgtctggctctctgggtgtgtgagagagcacaggtgtgtgtgccattcctcatgtgtacacaagagtgcaagcgtgtgggtttgtgcacacacacacactgcctttgtgtgcctgcctgctcctggagagctgaacttggctttcagctgaactggcctctctaggtgagagctgctgttgggtggggggccggtgagcatggttggagcctgtgtttctcggggcaggcgcagaagcgtgtccctgaggctgcccccagagtagacactgggcctgcagtgctggctgggctgggcctgctggctgggctgggcctgctgcctggagtctgctcttccttgcatagagctttaggcagttagaatacttcccacctccacggggcctctttctgtctttcccaacacttgtttttgttggtttcctgaaatactgtctttttcacccatgatgagtctgcttgtatgtcagtgtttttctgtgcaggtcaccctgggggggcaaacttgtttttggaaacgcttctgagtaggaggcctgggaattgggttccaaataaacattctcctccagtcatgcgaaaactatgctctgaagctgggtcttatctctgtatgaggtttaggttttgttttaagctaacgtggctagtctcagaaaatgtttatgagagtgaggaattggaaatgtttccagatggcttcaggtcagccagccctgagcatgacccatgagggccacaagggccagccctgcctctgtccctgccccttcctgaggccgccaaggggcggcacgctgcatccatgctggctggtatggagcctggcaccgtgctgccgggtacacgcggggcctcatctcatcctgcactcatggcagagcaggcctttcctccttgaacatgtagacaagtctcagagaggtcagtgcgccggcccgatgtctcccagtgagtggagaggccacgccacagtccgggccaggtctgacccagcactggcacccctgagcctatggcatcatccgaggactgtaatcctcaacccgttcctcagagcaacttggtgaaagggagtgtctgtctgctgtcagaagcagtggtggagatggcggctcctgtgctgaggtagagtcccaggggatgcgcacggtaaggagggaggaggcggcaggaacttgggtggagcagactgtggctctgtggttccatttcaaaatgaggagcacatttccagaggaggagagtctttctagctgttggttgtctttctagctggctagagcaagtgcctctggaaggccgccccttctggcacctggccagatgggggctcaggtgttaagaggggcggccgggagctacctgccatgtccagggttgtagacacggggagtgggtcagtgaggctgggccagcctggagcctgcctgcgccgttcgggagcctcatctctatcatcagcgcccgctcctcagtccttagacaccctgcaggtcctgcttccaaaacatggttgggtgtgctcttaactccggagccgcgtgggagggcctgccgccagctggcctgtcacgttgtggtggggaagggggtgccgaggctggctctgaggggaatctgtactcagcctttggcctcagtgatcccccaccccccattctcttgacaggtcagggcatcaggccagaggcccctcactgtttgggatcatggggagttggggggaagctctggcccctggggctcctcctgagcaccctttagagggttccaggtccctcagtggccaggatgtgcccttctgtgctgcgccaggaggtgctgctgtggggacatgggcagagtgtcgcgggactgccttaacaggagacttcaggttaagaaacctcagctccaatgttgggaggcgagacagagaggcagccgtgggagggcaaacagggtcaggcctggccttggcggtgcttccagccaggctgtgagggtgagcccccaactgtggcgccgttctctgggctcatttctctagtttcaggggaaactgtaaaacatcagtctgtcaaaagcacacaggctcgttattgccacacacaaggtgatttgaaggcagaattcgagctttaattcctacactttcaagttctctttggaagtcggtgagccagacttcctcactgaggctcctttattcccccgagccttctgtcgtgagcggtttcctagcttccagcgagaaccaggaaggaggtggttgctttggccatgtttcacggggagttgttggattcccacaaggaaacggccaaatgggagcgtaggggggtatctcggcccaatttgggcggcggggtcaggaggcagcctagaggaggcctgcgaggcctgggacccaggtgacgagcgggcccacagcagccctctcctggccccaccccactctgatgtccctccagctccccagtttggagatcagccctggccattgggtcccagtggcactttcagagggggtatctaaactactgcacataggcaggtcccccttcgtgttcctgttccagagctcattggcctctgttactccacacttgcacctggaggggctccggttgggaggcgcatgtaaacccagtgcaccgggacggcaccaaggagcagaggctgccctgcaccagccccgtccttagactgcgtggagggacctgcgccttgcccctctttctgcccgtaatgctgacacagtcctcagaggtcggggctgcagcacagatgttttctcgtgtttcggctctcacaccgtggtccctccttcctccactcaagtgatccttctaaaatggtggctctgcaggacctgcctctcagccagagggaaggtcggtggcctcaatgatgaggccacaagggacccagctctgtcctctgccctcccctctggctgtccctcgaatgtggccagtcctggtgcagtctgtcctgggacactcgggtttgctgctgctttgcctaaaatgctcttcctgggtctgcgcagggctgccgctcacttcccgcagggctcaccttccccggccttgcctgaagacacatcccatacctcagtcactcccactggaggcagactcactgtgaccagcaggaactctaggctgtgttccggttgtatccctgaccctggattggcacctcccgtggcgtgggagctaaagagaggctggtgaattaaggaactttcaggtttacttctcagtgtgtcttctctgttccaaaccacagttgtgaatgggagagttcacatccgcgactggcgagaggagacactgtggaagacaaagcaaccggaagcgaaacagagactgctctctgaagcctgcaaaacccgcctctgctggttcttcatgcatcaccctgatggctgcgctctgtccacggactgctgcccgtttgcccatgggcctgcggagctgcggccaccccggaccaccccgaggaagaagatttcatgagctgcatccttgccagccgaggcctggttggggaggccaaaccaaggagagcttccccagcagtcgtcagtgctgtggtctctgctctggctgtgtttcagcccacctcctcccagctttctccacatcctcacagtgatgaaccgtatttcataaacatcacacgccagagaagccacagttactcggaagcccccagctgactgcctggcttgtttcagatgcagccgcttgaaacgtgcgcagcatcttcatatcataaagattgtgcacggatccttacaatgtctcctgggggagagcggctgaggctgccttgcacaggcccttcccagggcgctgtccgacgcctgccccaccatgtccacatctgtgaagaggatggggctcctcgagaagtaagaccgtatctgccagcgtttctcaccacactggagagcagctgctctggagcagggatccaccagattggtatttttaaaaaaggtgtcaggcttgctatgttgaggttgtttttagagttacagagaataaaaacactcataatttcctgacatgggccactctaagtggcatgaaa

SEQ ID NO: 1170 - DNA, 8571 bp, Homo sapiens
ccctgtaagcccacctggctgggagctttccccttctccacgctgggttgctgctggcagtgctggtcactgtgacggtcagcaagctctggacgccagggtcgggtgtgtaacagggcctgggccgctgagcatggagcagggccccaggctgaaggaccctggctacctggatttcatcccagagaaaaggctgagcgtgtgaggaactgtgccgccctgccacgagattttattgaccaagtggttttgcaagtagcgaatttactgttaggtggaaagcaattaaacacaagaagttctcgaaatgggagtttgaagacctggaatgggggaggtaagctgtccaccatcttagggaggggctagcacgctcccaggcttgagggcaggaattcacgtcttcagaaccgacatgaaatggtgtggccctgtgactacacactttgaaaaagccattgatggtgggtgcataggctctcttcaagcaaattctttaaaattttccaaatagctcttataaacataaaggactttgttatttccagggagtgacagagtttggacccttaattaacttttaccaaacatgcaggtttaggggctagaactactcattttcaatctagaaattatccaaagagaaaacaggttactgagtgcaagcaaaatgcactgtccccttgagtatgtggtaagatttggagctgttgtgattcgataatttaattctctttgaaatccccaaaacacaacaatcatccatggcaaaaggagaaaattacatcgattgttctcatggggtgagtggtgtgctgaaattatgttctcaggtgagtggtgtgttgaaattaacggcattcagagagccagccagggctgtaaggacctcgcctccttccgggcagggatgctgcttggccgccagagggtggtgtagagctgcagccaacgcctggcttctcttgcagttttgggaactggagaagagcacggagccccatcccctcccggcccctccgtcggtgacttctgcctggctgcgcatttgagggaaacccttcttctccaggctttgctttcctcacctatgaatgttgggacaaaatcatacccgtttccttcttcatcctttgtcctcttgtaccatgtgtacgtgggatgggaccgggccatggagcatagacggcccctccagaaatcattcgaacctgatggtacctggtcagcagagcctctagccatctggcgagagtggccctggctcagtggctgatggggccgactagctgcaaaccaccaggcaccgtggggcctctgggttggccctgctgactaaaggcaccctgctgtggtggggctggagcacagaggaagaaggctgaggctggcagagcatggagcccaccacaggcaactgggacccagagccccagggacatcagtgtggtctgaaagttcccacgtgcagtaaacagtgacagttcttgagtgcagtttgacctttaaattcccaggagatgacgggcacacagatgtcagctgtgcctgggatggacggctttcggtgggtgaggaggaaggaggaacagacctggagatggagagcggggatgggtgagcggtgggctcagtcctgcctgcgccttggaacttgggaatcagggcacctaacaggctctggacccccgtcccctccagatgggtgtccgtgggtctggggcttgttagggactctccacgtggccttggcctctcagcccactgcctccctcccgcccacaggcgccttcagggcctttggtcgcccccacccagcctgtcctcaggcaggcacctctgcgtttctgtgcctgtgggccatgtgtggctctgtctccaggacctcacccatcctagctcggcgtctgtccctgtgggacactgctgagaaatagggtaggaaagggccctgccctcaagaggctccaagtcctgcctggctaggagtcaagaccgcacacgtcaaaggatgagaaaccaagaggccggatatgccaggccaggaggcacccatggctgagtgtgagattccctgttatggagtccatgctgggccagagccggggcaacagggaaggctgactgggacaatatgtgatcttttttaaaacactcccgctcctctcagaatggatttgagacagccgagaggtggactcagaaggttggccaggctgggtgggcaggattctcgcagcagctgcgacagcggctgccagcaccaggctcctgggtcaggagtgtggtgtcctgatccgtaggggtctgacaggctcagctgcatacagacaggcgccgtctcctccgctctcctgcagcttgggagggtgtggataagatgtgaggtgcagcacctggcagataggaagttcctggcaaatacatgcaggaaaaccagctttcattcatatccaatttgatgttttggtaataaatgactttaatgtcaccaggttttctgattagagcattttgaaatacctgcaggctctcaaagcagaaattcgaatgggaaagagaccatcactgtggtgtctgtgctgttcctttttttagtgcctagcatggccttgctggccaccctagagccggtagcgccaggctggctgccccatggttggagcagccactgggaaggctcaggccccaggcttgccagcttggccttccttctttagtctgagaaaccctggctccaaacagccaccccccttcatgggtcaccagtgagaagagcttgaggtgaccacccagagcaggcagcatcacctgacgcctggccctgtgcgggcatggggcatgtgtggggctgcgtcttgtcaggctgtgccaccttagctgggtggggacgccacggccctcacggtttggtgcggtgtggtgtgggttaggtgagatggaatcgtccttcgtgctggagtgcataacgcgtgtgagtgtatggaactgaaatggactgtttctgcctgtgtgacaggttcgtaatattttgctgttgttttggggaaaaaaaaaacccgtttttccacagagagcctatctctggcagaagtagccaacgagctggacacggagaccctgcggaggctgaagcgggagtgtgggggcctgcagacgctgctccggaacagccaccaggtgttccaaggtacggagtccgcctctcccccgccgttctttccttctttttcccccttttttcagttaaataatgttttattttagagtggtttagactcactgaagaatctgacagaagcagcaagttccgcggtgccccacccagctctgacgtgggtggcatttgacctcagggtgggacgtgggtcaccccgttccctccttgctcctctggacctcgtcccatgcgatgtccccaggctggtctctctccccctatgctgtgcttgctgacgcctcagctccacttgctccacgcaggacagagcaagtcgggtagccgctggccggtcccctgttggctgggggtcattgtttggcgtcatctttagctgctgcaaactgaaagcatcctgagccacagagccagggtggggagtgggaagagtgagccctgccccacaggcggaggcctggactcctgtggccctcgccccacgggcctgggcaggcggaggtcctggtacccagttcccctgctccccaacgccctgtgactccaggactgccagggtatggggaggcaggagggccctccacccgcttgtccattcactcagcccgcaaagcaaggcagacacatccctggccttctggagccggtggtgcagtgagggaggggggagatgtagcaggtgctcacccaggtgccagtggtgtacacacttccatcatctgcagcttccaggtgtgcacagagggggcaggaacagggcagggagccatggtttaccagcgccagcggctggggagtttgccataacttgctttgtggcgctttttttttttttttcctctttctgtaagtattttaaagcaaattctagctagcatgctatttcacccctaagtacttccacgtgcatctttaagaatagtaggtgtcttcttgtgtcaccaccatgccctaagcacacatttctgtgagttgtgatgtgcagggagaactggcctggcccgagtgggctcaggagggctttacttaggaaatgacacttgagctgggcctggaaggaaaagaggagtcaggaacagagaacagctttaggcagagcgaacagcatttgcaaagagccagggttgggaggagtaagagtgggagctggtcgggttacagccgccatgaccaggaaaaggactgggcctctgatgggtagggatgacaccgaagtcacagtgggaaggagtggcctggcttacaccctagcttctgggtcccctgcccatgaagtagccgtggggatcaggtgcagtacagtgtctggctctctgggtgtgtgagagagcacaggtgtgtgtgccattcctcatgtgtacacaagagtgcaagcgtgtgggtttgtgcacacacacacactgcctttgtgtgcctgcctgctcctggagagctgaacttggctttcagctgaactggcctctctaggtgagagctgctgttgggtggggggccggtgagcatggttggagcctgtgtttctcggggcaggcgcagaagcgtgtccctgaggctgcccccagagtagacactgggcctgcagtgctggctgggctgggcctgctggctgggctgggcctgctgcctggagtctgctcttccttgcatagagctttaggcagttagaatacttcccacctccacggggcctctttctgtctttcccaacacttgtttttgttggtttcctgaaatactgtctttttcacccatgatgagtctgcttgtatgtcagtgtttttctgtgcaggtcaccctgggggggcaaacttgtttttggaaacgcttctgagtaggaggcctgggaattgggttccaaataaacattctcctccagtcatgcgaaaactatgctctgaagctgggtcttatctctgtatgaggtttaggttttgttttaagctaacgtggctagtctcagaaaatgtttatgagagtgaggaattggaaatgtttccagatggcttcaggtcagccagccctgagcatgacccatgagggccacaagggccagccctgcctctgtccctgccccttcctgaggccgccaaggggcggcacgctgcatccatgctggctggtatggagcctggcaccgtgctgccgggtacacgcggggcctcatctcatcctgcactcatggcagagcaggcctttcctccttgaacatgtagacaagtctcagagaggtcagtgcgccggcccgatgtctcccagtgagtggagaggccacgccacagtccgggccaggtctgacccagcactggcacccctgagcctatggcatcatccgaggactgtaatcctcaacccgttcctcagagcaacttggtgaaagggagtgtctgtctgctgtcagaagcagtggtggagatggcggctcctgtgctgaggtagagtcccaggggatgcgcacggtaaggagggaggaggcggcaggaacttgggtggagcagactgtggctctgtggttccatttcaaaatgaggagcacatttccagaggaggagagtctttctagctgttggttgtctttctagctggctagagcaagtgcctctggaaggccgccccttctggcacctggccagatgggggctcaggtgttaagaggggcggccgggagctacctgccatgtccagggttgtagacacggggagtgggtcagtgaggctgggccagcctggagcctgcctgcgccgttcgggagcctcatctctatcatcagcgcccgctcctcagtccttagacaccctgcaggtcctgcttccaaaacatggttgggtgtgctcttaactccggagccgcgtgggagggcctgccgccagctggcctgtcacgttgtggtggggaagggggtgccgaggctggctctgaggggaatctgtactcagcctttggcctcagtgatcccccaccccccattctcttgacaggtcagggcatcaggccagaggcccctcactgtttgggatcatggggagttggggggaagctctggcccctggggctcctcctgagcaccctttagagggttccaggtccctcagtggccaggatgtgcccttctgtgctgcgccaggaggtgctgctgtggggacatgggcagagtgtcgcgggactgccttaacaggagacttcaggttaagaaacctcagctccaatgttgggaggcgagacagagaggcagccgtgggagggcaaacagggtcaggcctggccttggcggtgcttccagccaggctgtgagggtgagcccccaactgtggcgccgttctctgggctcatttctctagtttcaggggaaactgtaaaacatcagtctgtcaaaagcacacaggctcgttattgccacacacaaggtgatttgaaggcagaattcgagctttaattcctacactttcaagttctctttggaagtcggtgagccagacttcctcactgaggctcctttattcccccgagccttctgtcgtgagcggtttcctagcttccagcgagaaccaggaaggaggtggttgctttggccatgtttcacggggagttgttggattcccacaaggaaacggccaaatgggagcgtaggggggtatctcggcccaatttgggcggcggggtcaggaggcagcctagaggaggcctgcgaggcctgggacccaggtgacgagcgggcccacagcagccctctcctggccccaccccactctgatgtccctccagctccccagtttggagatcagccctggccattgggtcccagtggcactttcagagggggtatctaaactactgcacataggcaggtcccccttcgtgttcctgttccagagctcattggcctctgttactccacacttgcacctggaggggctccggttgggaggcgcatgtaaacccagtgcaccgggacggcaccaaggagcagaggctgccctgcaccagccccgtccttagactgcgtggagggacctgcgccttgcccctctttctgcccgtaatgctgacacagtcctcagaggtcggggctgcagcacagatgttttctcgtgtttcggctctcacaccgtggtccctccttcctccactcaagtgatccttctaaaatggtggctctgcaggacctgcctctcagccagagggaaggtcggtggcctcaatgatgaggccacaagggacccagctctgtcctctgccctcccctctggctgtccctcgaatgtggccagtcctggtgcagtctgtcctgggacactcgggtttgctgctgctttgcctaaaatgctcttcctgggtctgcgcagggctgccgctcacttcccgcagggctcaccttccccggccttgcctgaagacacatcccatacctcagtcactcccactggaggcagactcactgtgaccagcaggaactctaggctgtgttccggttgtatccctgaccctggattggcacctcccgtggcgtgggagctaaagagaggctggtgaattaaggaactttcaggtttacttctcagtgtgtcttctctgttccaaaccacagttgtgaatgggagagttcacatccgcgactggcgagaggagacactgtggaagacaaagcaaccggaagcgaaacagagactgctctctgaagcctgcaaaacccgcctctgctggttcttcatgcatcaccctgatggctgcgctctgtccacggactgctgcccgtttgcccatgggcctgcggagctgcggccaccccggaccaccccgaggaagaagatttcatgagctgcatccttgccagccgaggcctggttggggaggccaaaccaaggagagcttccccagcagtcgtcagtgctgtggtctctgctctggctgtgtttcagcccacctcctcccagctttctccacatcctcacagtgatgaaccgtatttcataaacatcacacgccagagaagccacagttactcggaagcccccagctgactgcctggcttgtttcagatgcagccgcttgaaacgtgcgcagcatcttcatatcataaagattgtgcacggatccttacaatgtctcctgggggagagcggctgaggctgccttgcacaggcccttcccagggcgctgtccgacgcctgccccaccatgtccacatctgtgaagaggatggggctcctcgagaagtaagaccgtatctgccagcgtttctcaccacactggagagcagctgctctggagcagggatccaccagattggtatttttaaaaaaggtgtcaggcttgctatgttgaggttgtttttagagttacagagaataaaaacactcataatttcctgacatgggccactctaagtggcatgaaa

SEQ ID NO: 1171 - DNA, 453 bp, Homo sapiens
agccatccttctgcctcagcctgtcaagtgactgggactgtagatgcacgccaccatgcctggccaacttttaaaattttagaggcggggtctcgctatgttgcccaggctggccttgaactcttgggttcatgcagtcctcccacctcagcctcccaaagtgctggcatgacagctgcgagccatggcgtctgacccccgatgtttctatttaaagttatttctatggttttatacaaaaggtcacatgcagtccacactgttctgccgttgactttctgcagtgtaccctggtgcctctccattgggtatatctgcctgattattggcagcagccgtgtggcattccgtggcagcgccgcactcatcacacctgagcagtgagaataaatgggcatcttctctgaaggcacctcagctctgcagcaccacggggcggcgctgccacgggcc

SEQ ID NO: 1172 - DNA, 453 bp, Homo sapiens; identical to SEQ ID NO: 1171

SEQ ID NO: 1173 - DNA, 3335 bp, Homo sapiens
ggaagaggcggacagcgaggccaagatttcagctgcgggacggtcaggggagacctccaggcgcagggaaggacgtgaggaggggaagcgggctggggcggcagccgggcggaggggcagctgcgcaggcggaatgaggaacgcctttgctctaaggcgaccaccctggcagctcttcactgaggggcctcggtttccacatctgtcgctctccggtcccaagaccaccaggaccgacggggctctccgggagggtcagcccctccggtggccccagtcatgcatcaggggacggatcagaagggctaggaagaggggtcgtggggaaggccccagaaaaaagaggaaggagggaagattttgcctgaagcgggaaagccaagggctgggcggcgcgagacccccattcctagcgactggggctggctggtggcccgcggcagcccccgcgccgggaggattaggcctcccgccgctcccacccgtccggaccctcccacgtgtttaggtcctcccaaaagtattcggcctccggcccctgccccttcccccggctggcctggacctcggggacgtggggggaaccccgtgggagcagggggattctggacggggagggagtagcggttggggagaaggctgagcggggaaaggagagaggggctccggggacggcagggaggagagtgggtcgtgccggagacccagggagagacacaatgggcaagattaggggtgtagggtgggagtgcgaactgactgattcctagcgtgggcagggaactttgctaaaactgcaggccccagggaacagcgcgggcagggtgggagggaacggagagggccaggcggaccctaaggtcaatttggagaaagggccatttccaggctccttcacctgtgcccagcgttctacaggcctggaccccgcccccgctccccaccctccccccagagcagggcgcgggaggaggcggctcgggctggctcggagagctgaggggcgcacacccgcttcgcagggccagggtgacacggaagcatgcgacggctgctgatccctctggccctgtggctgggtgcggtgggcgtgggcgtcgccgagctcacggaagcccagcgccggggcctgcaggtggccctggaggaatttcacaagcacccgcccgtgcagtgggccttccaggagaccagtgtggagagcgccgtggacacggtgagtagcatggcccgggcaggagcggggagggtcgtaccccaggagaccagcgcattcccacgaagggggacagaagtgcttgggctctgagccccagccctttggagaaaaggccactgtccagcctgctggaatgtgactgcgtgagggaggtgcggatcacaccagggcttgctctgcaccctcagctggctaccggccatcctctgcctgcctgtctgtccgcagcccttcccagctggaatatttgtgaggctggaatttaagctgcagcagacaagctgccggaagagggactggaagaaacccgagtgcaaagtcaggcccaatggggtgagtgaaggggtgtgagagcaatgggcgcatgctgggtgtgagtgcatggacttggggtttggggtgtggggcacatgcctgggtgtgcatgcatgaattgggaggtccattaagaagccctgaggttagagaccccactgcgaagagcctccttagaggtggagtggctcagcctgagcccaaggttgtgagagtggctggtgggagctggggcctggcagacaggaagatggtttggttacccctggacttatcttcatcagagcagggctcacctcggtctgagttcctctctcaagcatcagggcctgggtggaaggagccggctgtgtgggtgtgtctggtgcccccctagcctagcaggactccagtcatcagtcacggtgggggcaaaccttccaccgtgggggtgatgcctgggctgggagtgcagtgactgtgttctagttcccgctctgtgagcacggcctgggctctgtattacaggttctgcaaaggccccagttccctctgtcggctcaaggagggcactggactatagcaatgattcatcaacctcaaaatcaaatcttacaagaaaataaatagaataggtgacagctgagccactctggaggcgttgggtgggaagaacccatcggaggaggattcttgccttcacacgagcacaagcagacacatccatgcatacatcacacacccatccacccacactcctgcatacaaaccacatacatgcgtgtttatgcatgtgccacacaacccatctgggaaggactcctgcctgcacacacatgaaagttccatagtttgaaaactgcatgggtctgacttctgacattctagggtggctgtgcctgaaacctgctggcctgcatgacctcttgctcctgggctcgagggcctagttggggatctggtcccatgatgggcagccctggctcccaccctcatgatgcccaggcctccctcacccttttcctctgctcaccccatgctccccgctcccccacagaggaaacggaaatgcctggcctgcatcaaactgggctctgaggacaaagttctgggccggttggtccactgccccatagagacccaagttctgcgggtaagaaggggcaagggtgcacaggtggtgacagggctgggaagatggatggaagctgagcctatgggctggtctcgaggctaaagcttggccaagcaggagggagggcagtgggggctagaaagcgctgtgcctgtttggacattctccaagggatgtggaggggatgtggaggatgctggcagccctccactggcactgcccacccctcctacactgcctgaacagttttgggcactggcaggaggctgaggagcaccaggagacccagtgcctcagggtgcagcgggctggtgaggacccccacagcttctacttccctggacagttcgccttctccaaggccctgccccgcagctaagccagcactggtaggcaccagggggctgagagcaccgtctggatgaggccagccctgggaatgctgaggggctgggctgggctttgggagcctgggaggggacaggtcagaagcctgggaggaaagctgggactggggctgaagcaacctccctcacccccaaacctgtttccccttttgtctagagatgcgtggtgcctccaggaccgctgcgggtggtaaccagtggaagaccccagcccccagggagaggaacccgttctatccccagccatgataataaagctgctctcccagctgcctctcag

SEQ ID NO: 1174 - DNA, 2511 bp, Homo sapiens
tgcaaatgaaaacagaagcatttaatagatgtgtggacaagaacgggcagagaaggtgctgcggggagggggtaagtgcaggagcagtctggagaggcacatttgcaaggcaggggagtcccacttccaggagtgctctgggccactcagcctgcctactgtctcccaacagctgagacgggaggctggcccatccctacctttctcgcctgtagcctcaggaggaagtaattccttccactaagttgcaggctggagcagcccagagtggcagcagctgcggacacaggctcacggatgtgggagcccttacacctgctcacagcccttcagtctgtccttgcagcatgtggagggatggtggggaggggctgctctcaggatagggataaagcaatagcccagtgtgcagggccagtgaccagtgtgaagcaactaagacgagtgtgggggcagagaggggaactgggggcagcgaggccacctgccaggctgtcctgggccataggccacgttcagaagacgaaggaagaggtggggcccgcagagctgagtacctgctccgcctgggccaggctgtcgctggcctggcggtccaggtcccagcactcctgcagtgtgtcctggaactgccggcaggcctcctccaggatggagctgctccggctgggccaggactcccagtagcctggctccacccagggctgggcctcggtggctctggggcctggactggagctgggacgcaaggagctgtccaggtctcggcacagctggtagaactcactaccacgcccaatcacacgctcaccgtcgatgactttcaggccaggcagcagctcccggactgcagcccagtaggaggggttggcacagagcgggttgctgagccgggccaaagggtctcggagccgcaggtactccaggcacggtagcccagccagacactgcagctggcccggggtggccagtaggttgcctgcggcattgagactctgcaagttctcacaggtggccagtggctccaggcccgtcagccgattgttggagacattgagcacagctagctggcgcaaggaggccagcgggcccaggtgggtgagcgcgttgcctgataggtccagccactccaggcccaggcactctcccaggcagcccaggtcagccagtcccaagccacgcagcttcagtagcaggatggactccagggagaactcgcctgtgcgtgacttcagcagctggggtgtgatctgcagtccgccagcctctcccggcttctccgctggagggtccatgagatggaagtcggttgggatggcctgggccctggcaggactgtcacagggttccactgggggtcagctggtgctcgccctggctctacccaggccagtgccaggaggcctggttccgatgccctgctcgaagccagccagtccctgaggagagacagtcagtcagcaggcagcactttctgtgtcttacgcagcaggtgacggcagggagtctgaccctgcttttaccatgaaaaccaacaatctcagccaggcaagacctgaagaccaagctgggacacaggccacaaaagccatctgagtgacagggatggggtgcaggcccaacccaaggggagcagcccagactggccctggctggttagggccatgctggatggattcaggcccaatattaccagttcttcctgtcaaatccaaactaggggcaaaacattattttactttttccgtaaccactcacgatccatccctattagttttggggtgttttttaaaccgttatttttgaataggcaataggtaaccaccatcaccagtttcttttgttttctttctgggataatcaatgtatatgcaatgcaaacgagagcacatgtgccttgtttgattcactcagtattactgcaattctttctaacagcaatgaattcaaacttgtttccagattatatgggtcagctggtacctctggttggagctgtagagcataagaagttggcctttagtcctgaaggagaaaactgaggtcaaggtagtgaagggacagggaaggctggggtaagtggcctggctaggtcgcacacccttgctctcacttcactgcccgccaaagctagctcttttgctctggactcagctggacagatcaatggaacagcactgatatacgtgccagacagcacggtgccagctgcaaagacaacataaatttcccaaagggcaggctgtcttggagggagggaagggtggctccagaaagccgggaggggcacatcaaattgccaggggctgcaggaccaggtgagtccaggtgccagcgcatgactgtggcacaaagcaggggtggcctggtggagggacctcaagatttaagcagtgaggaaaataacagacctcttccaagcgcagctttcccaacctggcagactttggccaggcccagacccaggagtctcacccaggccggcggggtgatgcctgccctgcagatctg

SEQ ID NO: 1175 - DNA, 23855 bp, Homo sapiens
ttctagggtacatgtgcacaacgtgcaggtttgttacatgtgcgtacatgtgccatgttggtatgctgcacacattaactcgtcatttacattaggtatatctcctaatgctatccttctccccgcctcccaccccacaacaggccctggtgtgtgatgtcccccttcctgtgtccaagtgttctcattgttcaattcccacctatgagtgagaacatgtgatgtttggttttttgtccttgcgatagtttgctgagaatgatggtttccagcttcatccatgtccctacaaaggacatgaactcatcttttttatggctgcatagtattccatggtgtatatgtgccacattttcttaatccagtctgtcgttgggcatttgggttggttccaggtctttgctattgtgaatagtgccgcaataaacatacatgtgcatgtgtctttatagtagcatgatttataatcctttgggtatatacccagtaatgggatggctgggtcaaatggtatttctagttctagatccctgaggactcgccacactgtcttcaacgatggttaaaccagtttacagccccactaacagtgtaaaagtgttcctatttctccacatcctctccagcaccttttgtttcctgactttttaatgatcaccattctaactggtatgagatggtatctcattgtggttttgatttgcatttctctgatggccagtgatgatgagcattttttcatgtgtctgttggctgcataaatgtcttcttttgagaagtgtctgttgatatcctttgcccacgttttgatggggttgtttgtttttttcttgtgaatttgtttgagttctttgtagattctagatattagccctttgtcagatgagtagattgcaaaaattttctcccatcctgtacattgcctgttcactctgatggtagtttcttttgctgtgcagaagctctttagtttaattagatcccatttgtcaaatttggcttttgttgccattgcttttggtgttttagacgtgaagtccttgcccatgcctatgtcctgaatggtattgcctaggttttcttctatggtttttatggttttaggtctaacattgaagtctttattccatcttgaattaatttttgtataaggtgtaaggaaggcatccagtttcagctttctacatgtggctagccagttttcccagcaggatttggtaaacaggggatctttccccatttcttgtttttgtcaggtttgtcaaagatcagatagttgtagatgtgtggtattatttgtgagggctctgttctgttccattggtctatatctctgttttggtaccagtaccatgctgttttggttactgtagccttgtagtatagtttgaagtcaggtagtgtgatgcctccagctttgttcttttggcttaggattgacttggcaatgcgggctcttttttggttccatgtgaactttaaagtagttttttccaaatctgtgaagaaagtcattggtagcttgatggggatggcattgaatctataaattaccttggccagtatggccattttcatgatattgattcttcctatccatgagcatgaaatattcttccacttgtttgtatcctcttttattacattgagcagtggtttgtagttctccttgaagaggtccttcacatcccttgtaagttggattcctaggtattttattctctttgaagcaattgtgaatgggagttcactcatgatttggctctctgtttgtctgttattgatgtataagaatgcttgtgatttttgcacattgattttgtatcctgagactttgctgaagttgcttatcagcataaggagattttgggctgagacaatggggttttctagatatacaaacatgtcatctgcaaacagggactatttgacttcctcttttcctaattgaataccctttatttctttctcctgcctgattgccctggccagaacttccaacactatgttgctaggagtggtgagagagggcatccctgccttgtgccggttttcaaagggaatgcttccagtttttgcccattcagtatgatattggctatgggtttgtcataaataactgtgattattttgagatacgtcccatcgatacctaatttattgagagtttttatcatgaagggctgttgaattttgtcaaaggctttttctgcatctattgagataatcatgtggtttttgtcattggttgtgattatatgctggattatgtttattgatttgcatatgttgaaccagccttgcatcccaaggaagaagcccacttgatcatggtggataagctttttgatgtgctgctggattcggtttgccagtattttattgaggatttttgcatcgatgttcatcaaggatattggtctaaaattctcttttttggttgtgtctctgccaggctttggtatcaggatgatgctggcctcataaaatgaattagggaggattccctctttttctattgattggaatagtttcagaaggaatggtaccagctcctccttgtacctgtggtagaatttggctgtgaatccatctggtcctgggctttttttggttggtaagctattaattattgcctcaatttcagagccttttattggtctattcagagatccaatttcttcctggtttagtcttgggagactgtatgtgacgaggaatttatccatttcttctagattttcaagtttatttgcgtagaggtgtttatagtattctgtgatggtagtttgtatttctgtgggatcggtgatgataacccctttatgattttttattgtgtctatttgattcttctgtcttttcttctttattagtcttgctagcggtctatcaattttgttgatcttttcaaaaaaccagcccctggattcattgatttttttgaagggtttttttgtttctctatctccttgagttctggtctgatcttagttatttcttgctttctgctagcttgaatgtatttgctcttgcttttctagttcttttaattgtgatgttagggtgtcaattttagatctttcctgctttctgttctgggcatttactggtataaatttccctctacacactgctttgaatgtgtcccagagattctggtatgttgtgtctttgttctcattggtttcaaagaacatctttatttctgccttcatttcattatgtacccagtagtcattcaggagcaggttgttcagtttccatgtagttgagcagttttgagtgagtttcttaatcctcagttctagtttgattgccctgtggtctgagagacagtttgttataatttctgttctttcacatttgctgaggagtgctttacttccaactatgtggtcgattttggaataagtgggatgtggtgctgagaagaatgtatattctgttgatttggggtggagagttgtgtagatgtctattaggtctgcttggtgcagagctgagttcaattcctggatatctttgctaactttctgtctcattgatctgtctaatgttgacagtggggtgttaaagtctcccattattattacgtgggagtgtaagtctctttgtaggtctctaaggacttgctttgtgaatctgggtgctcctgtattgggtgcatatatatttaggatagttagctgttcttgttgaattgatccctttaccattatgtaatggccatctttgtctcttttgatctttgttggtttaaagtctgttttatcagagactaggattgcaacccctgcctttttttgttttccatttgcttggtagatcttccttttatttgagcctatgtgtgtctctgcacgtgagatgggtttcctgaatacagcacggtgatgggtcttgactctttatccaatttgccagtctgtgtcttttaattggagcatttagcccatttacatttaaggttaatattgttatgtgtgaatttgatcctgtcattatgatgttagctggttattttgctcgttaattgatgcagtttcttcctagcatcgatgatctttacactttggcctgtttttgcagtggctggtactggttgttcctttccatgtttagtgcttccttcaggagctcttttagggcaggcctggtggtgacaaaatctctcagcatttgcttgtctgtaaaggattttatttctccctcacttatgaagctcagtttggctggatatgaaattctgggttgaaaattcttttaagaatgttgaatattggcccccgctctcttctggcttgtagagtttctgccgagagatcagctgttagtctgatgggcttccctttgtgggtaacctgacctttctctctggctgcccttaacattttttccatcatttcaactttggtgaatctgacaattatgtgtcttggagttgctcttctcgaggagtatctttgtagcattctctgtatttcctgcatttgaatgttggcctgtcttgctaggttggggaagttctcctggataatatcctgcagcgtgttttccaacttggttccattctccctgtcactttcaggtacaccaatcagatgtagatttggtcttttcacatagtcccatatttcttggaggctttgttcatttctttttattgttttttctctaaacttctcttctcgcctcatttcattcatttgatcttccatcactgatacccttccttccacttgatcgaatcggctaaggacttctctgcattggttattctagttagccatttgtctaatcttttttctatgtttttaacttctttgccataggttcaaacttctcctttagcttggagaagtttgatcatctgaagccttcttctctcaggtcgtcaaagtcattctccgtccagctttgttccattgctgatgaggagctgcattcctttggaggaggagaggtgctctgatttttagaatttcagtttttcagccctgttttttccccatctttgtggttttatctacctttggtctctgatgatggtgaggtacagatggggttttggtgtggatgtcctttctgtttgttagttttccttctaacagtcaggaccctcagctgcaggtctgttggagtttgctagaggtccactccgaccctgtttgcctgggtatcagcagcagaggctgcagaacagcagatattggtgagcagcaaatgttgctgtttgattgttcctctggaagttttatctcagaggggtacccggccgtgtgaggtgtcagtctgcccctactggggggtacctcacaggctactcagaggtcagggacccactttaggaggcagtccgtccattctcagatctcaagctgcatgctgggggagccactactctcttccaagctgtcagacagggacatttaagtctgtagaggtttctgctgcctttcgtttgtctatgccctgcccccagagatggagtctacagaggcaggcagacctccttgagctgcggtaggctccacccagttcgagcttcccggaggctttgtttacctattcaagcctcggcaatggcggtcaaccctccccccacttcgctgctgccttgcagtttgattgcagactgctgtgctagcaatgagcgagtctccgtgggcataggaccctccgagccaggcacaggatacaatctcctgttgtgccgtttgctaagaccattggaaaagggcagtattagggtaggagtgacctgattttccagatgccatctgtcacccctttccttgggtaggaaagggaattccctgaccccttgtgcttcccgggtgaagcaatgcctcgccctgcttcagctcacgctcagtgtgctgcacccactgtcctgcacccactgtccgacagtccccagtgagatgaacctggtacctcatttggaaatgcagaaatcattcgtcttctgtgtcactcacgctgggagctgtagactggagctgttcctattcagccatcttggctccaccccctaatttttactcttaagtaaggattattttggactgagggactcactaagtgaaagtgattcatcatttcagactttgttacagggaggtgattatgcagtaaacatagtcaaacatttcaaaaatttgaagcatattttataaaacttacaagaaagaaagatacatactggatgaattgaaggaagaattcataaaaccatatgtgtctgcttcatattgagggaaactttttttttctttttttaacctctcagcactagttgacattgcttggctacgtactccgttagagtagagacagctattgccatagctcctgtgaattgaaacagaaattgtccatagtggaggcagtcacagatgggttaaacatgaaggagtcagaagtggtagaactaattctaaatactgagattccatactgagaggtaccaaagctacccaacaaactcttttcctcttgggaaacacatatacacctgacataaaaataaggtagacatttagtttgtagctgtagatctcaatagcattgtgtaatttttcctgttacttttcaagaccaacacatatcacagtatagggaggtcagagactcctgagggcagctctacaattctgaagcagtacatttcttttatatttttgtaggtaatgatttgttgtaagttatccatagttgtaagtaaccggatcatatgttttccttgatattatggagaatttgacaggttggagaaatacaaggtatgatttcatgattaaacataacaggaaatttaaatgggactttacatatgatctcaatttagctaagaactcaagaccaagctatacagacaccaaattacctccacattctaaagcaaggggctagaccaccttatgtaggacatgctaagagatagagaaatcgcttctgccagcattagcctatctcctgtctctcatctatataaggtgaggcaaagaattcatggggaagggtggaagtatttggaagtgaagatttctttggagatagttgtcagtatgctgtgtttgcccttcccatctccacagtgagggtggtgaaagtacttccccttcatctgaagccaagagaagaaaactgctcagaaagcttgaaatgttttctctggaatctagaaaattcaagttctggtatgtgaaagaaaaaaaaaattaaggcaagaagctgctgtcttactctactttctgctggtataacagaatacctgagataacagcattaattcattcatgagagcagagccctcatcctctaatcaccttttatttttatttttttgagacagcatctcgctctgtcacacagtctggagtgctgtggtgattgtagctcactgcagcctagaactcctgggctcaagtgatcctcctgccttagacttctgagtagctgggactacaggcgtgtgccaccctgccctgcttctaataacctcttaaagattcctcctcttaacactatcacaatggcaattaaatttccccatagttttggagggaacattcaaatagtaacatctagctagaacagcctgtctgttggcagaatgaagtagaacagtttagtgggaacaaggatacaagtgtatttttcatggaccaaatacagactctggaaaggatacggttgtggatcatcgggaaaagaacttcacgaaagagatagatgcacagatggatagtgaaggtcaccctggtgaaagccaaggactgaatgcaggtcttaaatggccagttgtggaaagaatcatccttataaaagaattgagataggagatctctaatagaggaggagttctctaatagaggaggagttctttgtgaaacccacagaaatcccccaactcaaaaaaaaaaaaccggccgggcgcggtggctcacgcctgtaatcccagcactttgggaggccgaggcgggtggatcatgaggtcaggagatcgagaccatcctggctaacaaggtgaaaccccgtctctactaaaaatacaaaaaattagccgggcgcggtggcgggcgcctgtagtcccagctactcgggaggctgaggcaggagaatggcgtgaacccgggaagcggagcttgcagtgagccgagatcgtgccactgcagtccgcagtccggcctgggcgacagagcgagactccgtctcaaaaaaaaaaaaaaaaaaaaaaaaaaaaaaaaaaaaaggaaaaacccaaaaaacgttgtatctaaaaggtagggcccaatttcaatttgcacctgtactggccatatgcaatgtagagccccattttcagttcgcaactttactggccatatgcaatgtggtctttttccccgggtttcccctctcttctaggctggacaatggaggaggcttgaaacagtacctggcaagtggtagaaagtgttggcccaggagagcaagaagaaggcaggctcctcacctccttcaccagggtgaatttgctggttttgaagcgaccctaatttggaagagagaagagccgagagttttaattggatgaaatattcctttagactggtcaatactttttcctttatatctaaaatccactggaagagctatgaaatctgtccaagatctcgttcagttcaggaaaaaccaaaaccaaaaccataaccagtgagtttataaaggaagtttatggtggattttttaaaattattttgataactgacattggggtattctccatcttatgagtctgaaaatatttcttcgcagccaggtaatacacatgtgactcagatgccaccaaagaagtatgtgtccaagacctcaagttgaaagctgtggactgcggagggactctctggtgaagttgttgcaagcatgattaattcattggggcagcaatggcagccaagccagtggtggtatcctgtgtccaggagtggtattggtgattcagtttgcagcctctgaggtacaaggataaggaaaatggtgaccagatcagttttgctgcctcagattagacataatttcaagctgtatatctctaatcctcctaataattctatgacctacatgatatcctttaaataaatgacttatcatttaaaataattccgaattgatttctgtgacttgcaatgaaatcaataaaaaaaaaaaaatacctggactattactagaaaacagaccaccagggaaatgggtcaatctgggattaattttctgacctggtttaggctgaaggcagtgataattcagatgactctaagggtggagcagctctagacatgcaggagtggaacagttaataataaaaaaaaaacctctgacttcctgaaaggaaataagaattaaaggcaaggccttagagacaatagggttattgccatggaagaatattaaagtgcatgagctatttaaagtctgtaaggtaggtggttacttcattaaagtgttgggcagtttagttaaggagaatggtaagcttaaaatttcaggttcttggctcatggtataaactgaaacctaaggatgttttatgacataatctcttgaagccataaggttaaactagccagaagccaaattaaaaatttgatcctgtaggtttccagctgtaacactgattaaattcataggaacacaaaagatctcttaggtgaaaaccagggcattgactgggaaataataggatctcaaatactataatgggtatatattgaaagattcaaatgtccctcagattatcctgaactcccagtctccactgatctttctttgcctactgaaacattttcttttgcctgtctgatgaggatgtcactgcttgatttgaggacatataaggaccttggctgagcagcgtccctgtaaggggaagccaatttcctcatgtcctattcacttccatctctcattgtcttcaggcctataattatagtcagactaagcagtaagggggcaagttggaaggagaagtgttaaataccaaaataatatgtattatattttgctgatgaatgctgaccaaactctgaccaactcttgcgaaaatgaattctgtgggtgctagggcaagtggggaagggcataattttagatcaggctaaatgggtcatgatgggtgcctttattagaaattctgtattgatcacactagctcaaaaaacattagaagttaaaattgtttgttctatttatagatagaaatccaagctcaaaaatgatccatgttcaatgaagttgagatgccagatatttctttagataatataaaggaaggaatacaaggacacagagagaggaatgtagggaggaatttttcatgtgctacgtgcttacctaacccccatactatgttccttgagagaagcccagaaaataaactttccaacaagggattgagaaataaattgtcaagggggagggctatggttcatttttccctgtaggttggcaggggatgctttggttgagatgggcttcctgatttcaaccaggataccagatactggggtggtagaggctaagtagtgaggcaggagaagccaggtaggcatgatcactatgacaggtagctggagtagtttggaaaatagtattgtctgatctactgcaatttttggaggtggcagtggaggtaccatatgtatcaattagattgttttgcctgaaaataatagaaatttgagtaaaagaggcttaaaaaatgaagatttattattattattattattttgcagttgcaagatttaatagagtgaaaacagagctcccatacaatgggaggggacccaaaggggttgcccctgaaaggaggttgcccactcccggctcgaatgcctggagtttatatcccaatcattgtccctccccctgtgccctcaggcgatatatgatttgactgtgtctttaccttctgctctagcctaatttgtattttagcgagccctctttactacctgattggttgggtgtgagctgagttacaagccctgtgtttaaaggtaggtgcggtcacctttcccagctaggcttaggaattcttaatcggcctaggaaatccagctagtcctgtctctcagtccccccgtcaacaggaaagcccaagtgctgttggcaaggttggccgacaaccactcttaactgcttcctgctgaattggggcatagtaggggttgtgcagttgagatttccttggaaagggtggcttcgatgtcattaacatcagagcatgggctagcaagccggtccaggggtccgtggtaggtcttagtcatggactgcatctgggggtccatttgaagaactgtttgcagttttacagcttcgattctggaagagacaaacttaacaaggaggttaaagatacagggattgaaatgtatggcctgaagtgcaggggattatttctttggcacacttcacaggccctgactatctgctttatagttttgaaaaggcctggttcagtaaataatgatgtggcaatctgatgggtgctatcaatgcctaagtaaaaggtttggtgaagggttttaagtaatttccattggttagctgcaggcagaagtatttttcctttttcggtggctagccatcctgaggggaggaaacgatgtcgatgtccttgtgagtttccccattcgatttcttctgctgagtactggggcttggtttcctggaggggattaccccatactaggggtccttctataagcttttctaatggagggtcctgtcttgcggctctttttgcttcagtatctgcttggcagttcccttctatttccctttcctttcctttctgatgaccccggcagtgtaagactgccacctctttaggtttctgtactgccaataataatctcctaatggcttcctgatgtttgataggtgttcccttggaagttaggaattccctttctctccttattgctgcgtgggcatggaggactaggtaagcatacttagagtctgtatatatatttaccctttttccttctcctaattctagggtataatgacccctgcttttgctaggatgtctctccctaacaaagaagtggagctttcaggcataattagaaaggcatgtgaaaagagtaaagttccccagtcacaacttagtggctgggagaagtatctagtgactggctgtcctaggacccctcagatagtgacagatctggaggacagttgtccaggacaggagagtaagactgagaagttcacgccagtgtccaggagacagttaacgccctggccctcaatggtcaagcatacccgggcctctgtgagggtgatggcatgggctggcacttgccctggaaaccctcagtcctgctgctggatcatctggttagtggcttctgactcagaggaccttcatcccctggggcagtgggccttccagtgattcccttgacataaggggcatggacgagggggtggcttatttctattcggacaatctttttgaaagtgtccttgtagaccgcactggaagcaagccctattaggcattcagtttgcccaggctttccctttttcagagcctccaaagtctacttgcctgagggccacgactaaagcagtgggtggccttttttgttttatcccagttttcccatttcacctgcttttcctgatctctattataaaaaaatcgaggttgccaatagggtttctaagttttgctccaggcctaaggcagacttttgaaattttttctaatgtgtgcaactgactgagtgataacttatcctttaagattagttggccttcagtagagtcaggtgacggagagatatgcttcctcaatgcctcccttagtctctccagaaaagcagtaagattttcttcctttccctgtgttatagtggacatcattgaatgatttataggctccttcctagttttccttagtccttctagcatgcaagttagcaaatgtctgtggcaccaatttccatgttctaattcagcgtcccagtgagagtctacactgggaactgcctcctggcctgtggggaatcattccctttcctctgttgtcatcctatcattgacctgactgagataccagagattgccaaactcttgggctgcagttatggtggcacttctctcatttggggttagtgtctgatctagcagtaacattatatctctccatgacagatcaaaggattgtcctaacccttgtaaaacatcaatgtagccatcagggttatctgagaatttacctaggtctattttaatttgtttcaagtctgagagggaaagagttacgtgcactctgactgggccaaattctccagaatatatcttaggagcttttttgccttggggggaacatttcccatctgaaaaaagaacatagggatgccagcacccctagtcattttctgatgagccttagtcctacagcgtcctctatggtcctaatgcttattcctttccagggtgcataaccacccatggacatctgcttatcggattagttaacattcactgatgtagcagtcctgcaccccttttcccgcctttcttgaccacaaagaaaggggtccaggctgctggattctagtggtcctttaccagtgtgcccaacattgcctttgtgctcaggggtgagtcctagagctaggctgggttcctgagtatttcataacaacccagttgccccatcaagatgcattcccataaacaacagttcttatgcaaattcatttcagagagggtgtaggtaacctttgagtcaggattgagatggagttttttgattctgtaagtactttaaggcttggctgagtgcaaagggctcatacgtttgagcagaccaattattaggcaatttttctaactctgcttctacaagagtttccctatcaattactgaatacccattgtggttttttttctccatcacctgggaggaaccatctattgtcctgttctgaagggagttcctcctaggtctggtgggaccttcgtatggtaattaagatttaaatccctttttaggaaatctgctgggttaagggaaatttcagtggttaatgttaaatcatctttttctaacagaatagtcctacactttaagatttttgagttagtaagctaccttttggctttgtttttttttttttttttttgacttaggatagttctgaactggtgaggtgtgttcacaatgaggttttctctaaaagttatttttctactttcttctgttagcaaaacagttgccactacagattgaatgcatttgggccatccgcaggttactgggttaaagatttttgataggaaggctacgagttgttagtggtctcagtgttttcaggctacgcccttgtttacactgacaacaaggtagtatcgagtgttatagggtcacagagaagaccttcaattatcaattataggttttaaatttactctggcttttaaaggaatagggcacactgttttttctttactacttctgtctttctctttctttctctctctgcctctcttacccaccacccccacctctctgtctctctctgtctctctcctctctgtctctgtaggtggattttggaaacacagtggagggtcgttcacttgttgcccccatttgccgctataggaatatgtgcctccctttaatttactcaattcattttcatcttgatatattatgttgtagacccagttccagttgttaaagtactgggttatcagttctaaggccctggcaagggtggtggggaacgggtcccacataactgcccatgtcgagagctgcatgcctaaattgggaggaacaccagggataaaactccctggattcatagcctaggtgcccaaggacacagcgtagagcttccttagatccctttagagatacaacttgctctaatacttgggagaggaagtgaaagtctgaagcattagtatctaggaggcagggatcagaggaagtagattcagaagtaagaagaattttggggctacactttcaagaaagttgtggttgggacccaggaggtatgggtcagaaggagaggtaggggcacacgcatgggcgactgttgagtagagacttctggctgcaccataatctcgaccatccaatgctgggggtttgggacaacagctttctgcctctagtcaaccctcagcttccccaggaaaattgtgaaagcaaaagctggttctaggtagaccaatgctcccaacccagaagggttggggcttgttagaaagccttttcccaggaagcctcacacctgagtcttaagtccagtggccatgctaattgtttttaactggctgacaggtgcctggtattttcctccaattctaaggaaggataggacagaatggcgagcaaattattactcaccgctttgaagaatccccgtacgggccaccgaatattacgggtggatctttgttcatagaactcccaagatggtggtgggccactcccaagatggtggtgagccactcccaagatggcagcaaaccttttgttctctgacctggggttcttggcctcatggattccaaggaatggaaccttgggccatgcggtgagtgttataactctattagaagccgtgggtcacggaagagaaccgtggaacccagcgactagtgttcagctctattaggacgaacctgggcacttagctgcgcaggaacaatggcgagactttagcctgattgggagtggcaatggatgcctcactggatcaggggcacagcggacaccctgctggatctggagtggtggaagtcaacagcgggtctgtgatggcagcaaacagtggtggacggcaagtgaaagctcagctcgagccataacaaatacgaaccagaagagtgtgcagttgcaagatttaatagagtgaaaacagagctcccatacaatgggaggggacccaaagggggttgtccccccaaaaatgaagatttattatctcacacaaccaaaagtctagaggatgttgataaattctccttttcagtgatgccagggccctagattgcttctctgccattttcttgtctttcccatcatggttgcaagacagctgctgcaactctggcctgtcatgtttttacatgacagcatccaagggcaggaagggaagagtcttcttttcacccttccctactccttcccctgcttttttttaataaagagggaaatggctcccaaaagtcctccagcagacttccttttatgtctcattcaccagaactgagtcacatgttcattccaaatcagtcactaccaatgggaatagaattagactaatcatggatcatctcctggagcactgggagagtcccatcttccctgagctcattattgcctgtttcttgaacagaattggggttctctttctaagggagaaatgaggaatggctgatgaataggcaatcagtgtagggagcctccttttgggggagttctcacctatttataatgtaacttaaaagacttccagctttgagcagagcttagagcagaagaagtctctttagctggcctaaattgtcacaagaacaactctgatgccttccttttatggaataaatggttttcttttcttttcttttttcttttttttttttttttgcaacgaagttttgctcttgttgcccaagctggagtgcaatggcactacctcagctcagctcaccacaacctctgcctcccgggttcaagcgattctcctgcctcagcctcccgagtagctgagattataggcatgcgccaccatgcctggctaattttgtatttttagtagagacgaggtttctccatgttggttaggctggtcttgaactcctgacctcaggtgatctgcctgcctcggtctcccaaattgctggggttacaggtgtgagccaccgtgcccggcgggaatgaatggtttttaagtgtctgtggcaggtgttgaatgtaacctgtgggaaggtccaataatagaagcatgatggagaacctcgagttttagagcaaagtaatgcttgtttcagtcctgttgtgattaaatgcctggctatgagacacactaggtgattgtgctacctgagtttctcactgtgaactgggtattacctgatccacagaattataaggctggacatgcccaggagaatactattatcaagtggaagtgatatatctgtgctatctgagtgggctctctctctctctctctctctgtgtatatttgtatatatacgtatatatatatacacatatatatgtatatatatacctatgtatatatacgtatatatacataggtatatatgtgtatatatacacatgtatatatgtatatatacgtatatatatacataggtatatatgtatatatatgtatatatatacactacacacacacacacacacacacacacacacacacacacacacacacatatatatataaactggatcccagcaggtcccaaaggtgctgggagaggaagtgaaggaagagttaactcacactcttccttcacttcctctccttgggggaatttcctataagcagttcaaagagcaggaagagaattatagcttggtttagaaatgctctgcacaatatcctggtagttgatagtggcagacttggaaaaatcttgctggggtatagaacttcaagcattatatttctgtgagccctcttggacaggaatgaaatcacctgaagtaaagatctacattgacttatgggtagtaatttatgatttggtcagatgatcagggactttgaaggaatatgattgtaagattggtaacaaggaaatctggagtagcggtgtgatggaccttttgtaatggtcactgagtgaggaaaattatgttccatgtgcttctcaccaaaaggtctgattttgaaggacattgtcaataattaggtgaacaagatgaccaccttggggatgttgttgagcagggcatccaactgcttgctcagtgggcttgtaaacgtagtggccgtggatataagcatggacccaacatcatagatactttcttgtcaaggctgttctagctcagccactgctgaataccagattgagaagtagcaccaccaaccctgggtccccagtatggtataataactcaaggggagtagacagtttctatgggacaggttggtcacatttgatctctttcatcatggaggaggcagaaatttgttctcactgggaccaacacttactctggatatagaattgttttctggctctgtcatgcttctacttctactatcatccatgaatttattaatataaattaaacatagactcagactctgagatttaaaaaattaaggcataagctttaaattactccattatgcatgtagggggaaaggaaaatgctaatgactttcttttaactaagcagaaaaactaaaatactgcttagaaatacagagatgtattcctacaacattcttcccaggtcaaaaccttgtcagtaagacaatcagaattacagattctttttggaggttattttcataggacaaagcaacactttctaacactttagagtcttataagacattttggttcaaataacatttacagagaatggatttctttttagtaaggaacagaaggtgttctagtaacagttatgaatattcacacagctccatattgctgagaacaaatggatattttttggaacattcttaatttattacctaatcaaatcagattttttgaaatagttaatgatgcagaattgtatttctcttttcatagatgcaaggagaagggacatcctttttctcagacttctttggttaattataaagatttatttttaaggccagcttctgaaattttattagctatattataagcaggtctatagaagataattttattgtcagaaatggagaaagtgataaaaagttatttaataccaaaacataggatgatattgtttttcttctatattattaagtaccttgtttacctataatttctttcaaaaagaacttgaaacttcagagaagataaatggtctatccttgggttttttattttattttattttattttgagatggagtctcactctgtcacccaggctggagtgcagtggcgggatctcagttcactgcaagctccgcctcccaagttcactccattctcctgcctcagcctcctgagcagctgggactacaggcgcccgccaccacacccggctaattttttgtatttttagtagagacaggttttcaccgtgttagccaggatggtctcgatctcctgactttgtgatctgcccacctccgcctcccaaagtgctgggattacaggtgtgagccaccgtgcctggcctatccttgggtttaaagttatagaataatagtgcctaagaggtatgaaagaaaaaaattaaaaaataaagttatataataagagcagtctggtttaatagcatttcagagtggatatatttaggaattttataaagctcaatatttgtcaacaataggagatggctggcaagagaatacatagagactgcatttactggcatatttttccaaataaggatgttattcagactgtatgtagaatattgagtttaagttatacttagagacatttaattaggaataaagaggacttggtggtagtgggaagagtaggggagaggcatgccaattgtcttcaactctccgagggactaggcttactctgtgatactccagagagcagaactaggaaggcagagcttagatttagccataaggaagaaattggcctgtgtatgtgttaagcccaaggttagctgacctgccagacatattttaaaaagtgatttctttattgcatttggagttggaaaccatccatgtttcttcacccaactttttactttgaaaaatttcaagatttcaaaatctgaaaaatagtacaataaacatctctatgtccttcacctaggtgtaccaatattttttgccacacttactttctctctctctctctctctctcacacacacacacacacacacatatttttttgcatcaatgttcatcaaggatattggtctaaaattctctttttttttgtttgtgtctctgccaggctttggtatcaggatgatgctggcctcataaaatgagttagggaggattccctctttttctattgattggaatagtttcagaaggaatggtaccagttccttcttgtacctctcgtagaattcggctgtgaatccatctggtcctggactctttttggttggtaagctattgattattgccacaatttcagatcctgttattggtctattcagagagtcaacttcttcctggtttagtcttgggagggtgtatgtgtcgaggaatttatccatttcttctagattttctagtttatttgcgtagaggtgtttgtagtattctctgatggtcgtttgtatttctgtgggattggtggtgatatcccctttatcattttttagtgcgtctatttgattcttctctcttttcttctttattagtcttgctagtggtctatcaattttgttgatcttttcaaaaaaccagctcctggattcattaattttttgaagggttttttgtgtctctatttccttcagttctgctctgatttttgttatttcttgccttctgctagcttttgaatgtgtttgctcttgcttttctagttcttttaaatgtgatgttagggtgtcaattttggatctttcctgctttctcttgtgggcatttagtgctataaatttccctctacacactgctttgaatgtgtcccagagattctggtatgttgtgtctttgttctcgttggtttcaaagaacatctttatttctgccttcattttgttatgtacccagtagtcattcaggagcaggttgttcagtttccatgtagttgagcagttttgagtgagtttcttaatcctcagttctagtttgattgccctgtggtctgagagacagtttgttataatttgtgttcttttacatttgctgaggagagctttacttccaactatgtggtcaattttggaataggtgtggtgtggtgctgagaagaatgtatattctgttgatttggggtggagagttctgtagatgtctattaggtctgcttggtgcagagctgagttcaattcctgagtatccttgttaactttctgtctcgttgatctgtctaatgttgacagtggggtgttaaagtatcccattattattgtgtgggagtgtaagtctctctgtaggtctctaaggacttgctttatgaatctgggtgctcctgtattgggtgcatatagatttaggatagttagctgttcttgttgaattgatccctttaccattatgtaatggccttctttgtctcttttgatctttgttgatttaaagtctgttttatcagagactaggattgcaacccctgcctttttttgttttccatttgcttggtagatcttcctccatccttttattttgagcctatgtgtgtctctgcacgtgagatgggtttcctgaatacagcacggtgatgggtcttgactctttatccaatttgccagtctgtgtctcttaattggagcatttagtccatttacatttaaagttaatattgttatgtgtgaatttgatcctgtcattatgatgttagctggtttttttgctcgttagttgatgcaatttcttcctagcatcgatggtctttacaatttggcatgattttgcagtggctggtactggctgttcctttccatgtttagtgcttccttcaggagctcttttagggcaggcctggtggtgacaaaatctctcagcatttgcttgtccgtaaagtattttatttctccttcacttatgaaacttagtttggctggatatgaaattctgggttgaaaattcttttctttaagaatgttgaatattggcccccactctcttctggcttgtagaatttctgccgagagatccgctgttagtctgatgggcttccctttgtgggtaacctgacctttctctctggctgcccttaatattttttccttcattttaactttggtgaatctgacaattatgtgtcttggagttgctcttctcgaggagtatctttgtggcattctctgtatttcctgaatctgaatgttggcctgccttgctagattggggaaattctcctggataatatcctgcagagtgttttccaacttggttccattctccccatcactttcaggtacaccaatgagacgtagatttggtcttttcacatagtcccatatttcttggaggctttgttcatttctttttattcttttttctctaaacttcccttctcacttcatttcattcatttgatcttccatcactgataccctttcttccagttgatcgcatcggctcctgaggcttctgcattcttcatgtagtactcgagccttggctttcagctccgttagctcctttaagcacttctctgtattggttattctagttatacattcatctaaatttttttcaatgttttcaacttctttgcctttggtttgaatttcctcctgtagctcagagtggtttgatcgtctgaagccttcttctctcaattcaccgaagtcattctccatctagctttgttctgttgctggtaaggagctgtgttcctttggaggaggagaggtgctctgctttttagagtttccagtttttctgctctgttttttccccatgtttgtggttttatctacttttggtctttgatgatggtgatgtacagatgagtttttggtgtggatgtcctttctgtttgttagttttccttctaacagacaggaccctcagctgcaggtctgttggaatttgctagaggtccactccagaccctgtttgcctgggtgccagcagcgatggctgcagaacagcggattttcatgaaccgtgaatgctgctgtctgatcgttcctctggaagttttgtctcagaggagtacccggccatgtgaggttttagtctgcccctactggggggtgcctcccagttaggctgctcgggggtcagaggtcagggacccacttgaggaggcagtctgccctttctcagatctccagctgcatgctgggagaaccactgctctcttcaaagctgtcagacagggacattttaagtgtgcagagcttactgctgtctttttgtttgtctgttccctgcccccagaggtggagcctacagaggcaggcaggcctccctgagctgtggtgggctccacccagttcgagcttcccggctgctttgtttacgtaagcaatcctgggcaatggcgggcgcccctcccccagcctcactgcggccttgcagtttgatcttagactgctgtgctagcaatcagcgagactccgtgggcataggaccctccaagccaggtgcgggatataatctcctggtgcgacattttttaagcccgtcggaaaagcgcgttgttggggtgggagtgacccgattttctaggtgccgtctgtcacccctttctttgactaggaaagggaactccctgaccccttgtgcttccggagtgaggcaatgctcgccctgcttcggctcgcgtgcggtgcgctgcacccactgtcctgcgcccactgtctggcactccctagtgagatgaacccggtacctcatatggaaatgcagaaatcactcatcttctgcgtcgctcatgctgggagctgtagactggagctgttcctattcggccatcttgactcccc

SEQ ID NO: 1176 - DNA, 484 bp, Homo sapiens
aagtgatcctcctgccttagactcctgagtagctgggactacaggcgtgtgccaccctgccctgcttctaataacctcttaaagattcctcctcttaacactatcacaatggcaattaaatttccccatagttttggagggaacattcaaatagtaacatctagctagaacagcctatctgttggcagaatgaagtagaacagtttagtgggaacaaggatacaagtgtatttttcatggaccaaatacagactctggaaaggatacggttgtggatcatcgggaaaagaacttcacgaaagagatagatgcacagatggatagtgaaggtcaccctggtgaaagccaaggactgaatgcagttcttaaatggccagttgtggaaagaatcatccttataaaagaattgagataggagatctctaatagaggaggagttctctaatagaggaggagttctttgtgaaacccacagaaatccccc

SEQ ID NO: 1177 - DNA, 470 bp, Homo sapiens
tttgtaatcttgttgggtcaagagaagaggttcactactaggcacggcctggtttggtcctcagatgactggctcagagccaagacatctggattctctaaaatattgaaaaaaccaaaggtgcttttcctactcctttgcttatactcacacagtcactcaacaatttacttctaacaacagatacgttgaggtttttccccacacacctagcaatctgcaatggacaccgactgcatgccctaaaaatcaattcaattctgacactatctactgggagacagtgtcagatcccacaagcctgttccccccacccaacactacagatggtaattgcaagcctcaggttgcgacctgtgcttctgttcaactggctatacattgggactctcatgaccccccgccttaggctcaattaatttgctaaagtggctcacagaactcagggaaacactttacttaagtttgac

SEQ ID NO: 1178 - DNA, 470 bp, Homo sapiens
tttgtaatcttgttgggtcaagagaagaggttcactactaggcacggcctggtttggtcctcagatgactggctcagagccaagacatctggattctctaaaatattgaaaaaaccaaaggtgcttttcctactcctttgcttatactcacacagtcactcaacaatttacttctaacaacagatacgttgaggtttttccccacacacctagcaatctgcaatggacaccgactgcatgccctaaaaatcaattcaattctgacactatctactgggagacagtgtcagatcccacaagcctgttccccccacccaacactacagatggtaattgcaagcctcaggttgcgacctgtgcttctgttcaactggctatacattgggactctcatgacccccctccttaggctcaattaatttgctaaagtggctcacagaactcagggaaacactttacttaagtttgac

SEQ ID NO: 1179 - DNA, 4476 bp, Homo sapiens
tttatttaaaatagaaatttatttctcagagttctggaatctgggaagtccaatatcaaggtgtcagcatctgcagagggccttcttgctgcatggtgaaaggtgagaggatgagagagggacaaacttgcttttgtaactaacccaatctccacataacaaatccactcctgagacaacaccattaatccatgcattaagtcagagttttcatgacctaatcacctcttagaggtcccacctttcaacactgttacattggagattaagtttccaactcatgaactttgggggacacattcaaaccacagaacatacaaaagatactcttatcactctggggattcctagagttttagaaactgtacgccaagaaatggggacaaagaccaaatatatatttcacaaaattatgggttcctctcccaatttaccacctactcactgcatgaccttagagaagtcacttaattcctctgcacattggtttccccacatataaaatgaaatgtcggactagatgattgttaagttccttttagttctcaaattctatgcctttttattaacttcctagaatgtatgttgtttttcttttacataggagacaaaattaaatggaatttttgagaataatttttgagaattattctcgaactcctgagcctcacaaatagtaggaattcaagagtaaccacaaaattaattattgatttcaatatatttatgctgtatgaactatgaatggcataagacttgcagaataaggcaaaagaagtttcacattaactgtcctctctaaggaagtaaaaacagtttcattaccctatttgaaaaagattaagaataacttttattcacagagtttcccagatctgtacatttgtgctggcattgcacaagtgacataataatattaattcctggcatttattgagtacttgtttcatatcaaacaatgttttacacatatgcatttatgtctaatctaatcttcataacaattgccagagggaagtattactattatatacaatttatacatgaaaaaaatcaaggcacagagatgttaagtacacctcagacagctagtaggtggcacaggaggacttttctttaggtgttccaaaggccagagactatgtctgtaactattatactaagttataccaatctcctccagcctggacatatggagtcttttctacccatgattaaaagcttgagaaaaatgagcctgaatttttgactggcctgaaatttcatcctaagaaagaggatagtaatgcagctaatatattttaacataggtgaaaaaaccaaaagggtaatacacaaatccatgagaaaaatggacaaaaatatgtagatacagacaacagaataaacacaacataccaataaatatgacaatgtcatctatctcaatcaggaaatctactataaaatgagatttttttactcaatagattgtgaggggaaaatggtgttacatgtgatgttgatgacactcacacattgttggtggaggtataaattggcacacattttggatttaaaaaactgaaattatttacccaacatttaaaacacgcatactaattctaagaatccattctacagaaatacttacatatgtaactgcacaaagaaatgtgtacatggatttggtattaaattgatttcaaaaattcaaaagatcaagtgttaattttgaaattactaaattatgaaaaatgttacacagctattaaatagaacaagtattatctaaaatgagctgcaatgaaaatagctcatcaaatatagctaaatgaaaaaagcaagtaacatttttataagactttgtcatttgtgcagggaaatctcctagctatacataaattcgtacacctgtatatgtgtatgtgagtacacatgtatgcacatgtgtgtttacatacatctgtatttaatttcgtgatctggaatgatgtacattaagtagtcaacagaagttgctttaggcagaggaatgaactaggagaaataaacccttctatgtttttcaataatattacaggaaacacgtattaatgttagaatttctaaaaagccttttctcaaaaaacgtctggccccttaagttctcaaaacagtacacatttctcatatattttagtaaaagccaaaattaagcaattattaaaagcagtttagaatcttgttggattgtgctaaattgtatcaaagtgtttcctcaaaaatatcattttgtatcacttacattattattcaatattgggctatgtttaagtaagttaacctatattattaattaaaatagtttgcatgagaaaccaaatagcacacaaaataaaccatgactcctcagactctaagataactgcatgacataagcaaaaagtcagtatttcatgccatatgttgatgctttttagaatatgaattgatctcgagagctcctaataccttagctttagagttactagcccttcctcattcctctcatcgccatagtaatgttaaataatgtattaggtaggataaacagcaacaggtaaactcccaaatcacagtgatttaacaaaataaaactttacatcttgctcatgtaaagtcctaggcagggatgacagacagccttccactggtgatgcagggacccaggcaccttccatcgcatggtcccgccatcctagagccctgtaggccttcacttccagccagtgatgggaaggccaaacatggaggaggcatgccctcctcctccatgcatgccctccttccactgcagccctggaagctgcacaagtctcttctgcttgtataccttttgtaagaacatgaccccacctaaatataagagggctgggaaatgcaatcccacactggcagttaagtccagagacaattgtgcaagggaagaagaccccacatcttttaaggaatttgtcttagttaaggtaacactagcagctgaaacaaaccctaaaagtaagtccttacaattatttctcttttgttctctgtttcaaaggatttcagatgaacttctgcccttttaactcataattattcatgaaatataattgagaacattagcattttcactctcttctcattccacttctgtcatgccatcctgaagatatatttacctatgtcttggctgtttctccgaacattattagctgctcttttataaaacatctcttaggataatttactctgtaaggtggctaaacccacccatcttatgttagcttttgtctgtattactctcaaatgaactctgtggtcaaattctaaaagtactttaagcatagaagttataaatgttcaatgaaatcaaatgcccaatgctggaagatcatgtaaatatttctcatttcaattaatattggctgtgtcgtttatgtgctgagttctttcatatacttttgtgtcatttttactgtcttcaacagaagttatttcaatttaattttaacagaatattgacaattttgagttatagctattgatattcatgttcctaaagggtttttgctaagtttttgtttgtgtgacattcccaaatgttatacttacttactaattattttctatctttttaatttttataccctcaaatgtgtgtttataaccaatgttcctaaggtgttggttatatagaaatgaattctctaaagccattattcacagaactttcagctgactacttgctcccaaaaggcagtttcctgatttctgcatactggcgtatcatgcaaacatctgtaagcatatccatttctactaagatcggactgttctgtctgtgttattttccttcgtatacttttacgttttgtatgtgtttactctgaccatttttagaagcttaagcttcttcaacttgatatgtgataaatcatgtaatttgaggcgatgcatttcctaaattagtttgtttggcatcataaaaaccttatatttaacttgttttagctcacattttctgttttctaccttaaaatgactttttctaactgatgttcatatgatgaggaatatgggaaaaagttctaaaattgttgttttcacaggcttgtcatttatatctgttgcacttcaccggggtgtggaaagaaaaataaagaaaagattctaatgtttatggatggcctactaggcactagacttttcatatgatcaggagcatttttgtgtgtccccaaagcaattcactgtggacatatacagctggaacacaggtgagcgtgttctcacaccctgattacctgggcaagattttccttgggtttataccataaccccagcaggtcaaagaccacattgtaataaactcattagtttgtaaattgcataattgcttaatataaaattcataatcctcctatgtccagtagaagaaagaagtagaaataaacatgaaaatacctttgaccagcaaatatctccaccctccag

SEQ ID NO: 1180 - DNA, 4968 bp, Homo sapiens
tttatttaaaatagaaatttatttctcagagttctggaatctgggaagtccaatatcaaggtgtcagcatctgcagagggccttcttgctgcatggtgaaaggtgagaggatgagagagggacaaacttgcttttgtaactaacccaatctccacataacaaatccactcctgagacaacaccattaatccatgcattaagtcagagttttcatgacctaatcacctcttagaggtcccacctttcaacactgttacattggagattaagtttccaactcatgaactttgggggacacattcaaaccacagaacatacaaaagatactcttatcactctggggattcctagagttttagaaactgtacgccaagaaatggggacaaagaccaaatatatatttcacaaaattatgggttcctctcccaatttaccacctactcactgcatgaccttagagaagtcacttaattcctctgcacattggtttccccacatataaaatgaaatgtcggactagatgattgttaagttccttttagttctcaaattctatgcctttttattaacttcctagaatgtatgttgtttttcttttacataggagacaaaattaaatggaatttttgagaataatttttgagaattattctcgaactcctgagcctcacaaatagtaggaattcaagagtaaccacaaaattaattattgatttcaatatatttatgctgtatgaactatgaatggcataagacttgcagaataaggcaaaagaagtttcacattaactgtcctctctaaggaagtaaaaacagtttcattaccctatttgaaaaagattaagaataacttttattcacagagtttcccagatctgtacatttgtgctggcattgcacaagtgacataataatattaattcctggcatttattgagtacttgtttcatatcaaacaatgttttacacatatgcatttatgtctaatctaatcttcataacaattgccagagggaagtattactattatatacaatttatacatgaaaaaaatcaaggcacagagatgttaagtacacctcagacagctagtaggtggcacaggaggacttttctttaggtgttccaaaggccagagactatgtctgtaactattatactaagttataccaatctcctccagcctggacatatggagtcttttctacccatgattaaaagcttgagaaaaatgagcctgaatttttgactggcctgaaatttcatcctaagaaagaggatagtaatgcagctaatatattttaacataggtgaaaaaaccaaaagggtaatacacaaatccatgagaaaaatggacaaaaatatgtagatacagacaacagaataaacacaacataccaataaatatgacaatgtcatctatctcaatcaggaaatctactataaaatgagatttttttactcaatagattgtgaggggaaaatggtgttacatgtgatgttgatgacactcacacattgttggtggaggtataaattggcacacattttggatttaaaaaactgaaattatttacccaacatttaaaacacgcatactaattctaagaatccattctacagaaatacttacatatgtaactgcacaaagaaatgtgtacatggatttggtattaaattgatttcaaaaattcaaaagatcaagtgttaattttgaaattactaaattatgaaaaatgttacacagctattaaatagaacaagtattatctaaaatgagctgcaatgaaaatagctcatcaaatatagctaaatgaaaaaagcaagtaacatttttataagactttgtcatttgtgcagggaaatctcctagctatacataaattcgtacacctgtatatgtgtatgtgagtacacatgtatgcacatgtgtgtttacatacatctgtatttaatttcgtgatctggaatgatgtacattaagtagtcaacagaagttgctttaggcagaggaatgaactaggagaaataaacccttctatgtttttcaataatattacaggaaacacgtattaatgttagaatttctaaaaagccttttctcaaaaaacgtctggccccttaagttctcaaaacagtacacatttctcatatattttagtaaaagccaaaattaagcaattattaaaagcagtttagaatcttgttggattgtgctaaattgtatcaaagtgtttcctcaaaaatatcattttgtatcacttacattattattcaatattgggctatgtttaagtaagttaacctatattattaattaaaatagtttgcatgagaaaccaaatagcacacaaaataaaccatgactcctcagactctaagataactgcatgacataagcaaaaagtcagtatttcatgccatatgttgatgctttttagaatatgaattgatctcgagagctcctaataccttagctttagagttactagcccttcctcattcctctcatcgccatagtaatgttaaataatgtattaggtaggataaacagcaacaggtaaactcccaaatcacagtgatttaacaaaataaaactttacatcttgctcatgtaaagtcctaggcagggatgacagacagccttccactggtgatgcagggacccaggcaccttccatcgcatggtcccgccatcctagagccctgtaggccttcacttccagccagtgatgggaaggccaaacatggaggaggcatgccctcctcctccatgcatgccctccttccactgcagccctggaagctgcacaaatctcttctgcttgtataccttttgtaagaacatgaccccacctaaatataagagggctgggaaatgcaatcccacactggcagttaagtccagagacaattgtgcaagggaagaagaccccacatcttttaaggaatttgtcttagttaaggtaacactagcagctgaaacaaaccctaaaagtaagtccttacaattatttctcttttgttctctgtttcaaaggatttcagatgaacttctgcccttttaactcataattattcatgaaatataattgagaacattagcattttcactctcttctcattccacttctgtcatgccatcctgaagatatatttacctatgtcttggctgtttctccgaacattattagctgctcttttataaaacatctcttaggataatttactctgtaaggtggctaaacccacccatcttatgttagcttttgtctgtattactctcaaatgaactctgtggtcaaattctaaaagtactttaagcatagaagttataaatgttcaatgaaatcaaatgcccaatgctggaagatcatgtaaatatttctcatttcaattaatattggctgtgtcgtttatgtgctgagttctttcatatacttttgtgtcatttttactgtcttcaacagaagttatttcaatttaattttaacagaatattgacaattttgagttatagctattgatattcatgttcctaaagggtttttgctaagtttttgtttgtgtgacattcccaaatgttatacttacttactaattattttctatctttttaatttttataccctcaaatgtgtgtttataaccaatgttcctaaggtgttggttatatagaaatgaattctctaaagccattattcacagaactttcagctgactacttgctcccaaaaggcagtttcctgatttctgcatactggcgtatcatgcaaacatctgtaagcatatccatttctactaagatcggactgttctgtctgtgttattttccttcgtatacttttacgttttgtatgtgtttactctgaccatttttagaagcttaagcttcttcaacttgatatgtgataaatcatgtaatttgaggcgatgcatttcctaaattagtttgtttggcatcataaaaaccttatatttaacttgttttagctcacattttctgttttctaccttaaaatgactttttctaactgatgttcatatgatgaggaatatggaaaaaagttctaaaattgttgttttcacaggcttgtcatttatatctgttgcacttcaccggggtgtggaaagaaaaataaagaaaagattctaatgtttatggatggcctactaggcactagacttttcatatgatcaggagcatttttgtgtgtccccaaagcaattcactgtggacatatacagctggaacacaggtgagcgtgttctcacaccctgattacctgggcaagattttccttgggtttataccataaccccagcaggtcaaagaccacattgtaataaactcattagtttgtaaattgcataattgcttaatataaaattcataatcctcctatgtccagtagaagaaagaagtagaaataaacatgaaaatacctttgaccagcaaatatctccaccctccagggagaggtagtagcttctagggaaaccatcttggagagggtcctgtcttcccctgaggtgggctctgaatccagcactcttcccctttcagaataaagattagagaataattctaatacacgatctacagtggtggtttgtgtcttaggagaccctcccttcaggcaggttctaataagccccaccgggacaccttggcccctccgttgactccccagtctgctctgtgcctccctcaccagctccccaaagcatctccataccttggagggtcacttggaaccagctaacttttcagggtcctttcttcccagttctgctgcaacacaagtaacccagattacatcagggagaggctgagctacagaggttcctgccaggagcttattcattgtcacactggttctgcttcctgacaggttcacttgaaccatctgaagcttggggaacaagggcagtgctgggattcatgaaatccaagcattccgggac

SEQ ID NO: 1181 - DNA, 5990 bp, Homo sapiens
gggaggtatctgaaagccacttcaagtacccaattgtggagcagtacttgaagacaaagaaaaattctaataatttaatcatcaagtacattagctgccgcctgctgacactcatcattatactgttagcgtgtatctacctgggctattacttcagcctctcctcactctcagacgagtttgtgtgcagcatcaaatcagggatcctgagaaacgacagcaccgtgcccgatcagtttcagtgcaaactcattgccgtgggcatcttccagttgctcagtgtcattaaccttgtggtttatgtcctgctggctcccgtggttgtctacacgctgtttgttccattccgacagaagacagatgttctcaaagtgtacgaaatcctccccacttttgatgttctgcatttcaaatctgaagggtacaacgatttgagcctctacaatctcttcttggaggaaaatataagtgaggtcaagtcatacaagtgtcttaaggtactggagaatattaagagcagtggtcaggggatcgacccaatgctactcctgacaaaccttggcatgatcaagatggatgttgttgatggcaaaactcccatgtctgcagagatgagagaggagcaggggaaccagacggcagagctccaaggtagggtttgcttttggcagaggctacgggagtctaccgagagcctttgcagcagccttgtgggaatattgacagtctttaccctgcccatcatttaaaccatttccaagcattaaaaaccttaataccaaggtgcggggtagggggagtgggaacccctcagtataaggagagagaggaaaagaattggtgctgctctacatttccaaagaagaataacttctgtgctttttctggtttttccctcttctctgtctgtctcacactctctcttgctcagcaatcttccttgtctttcttgcttatttttgtcttatcttactggctttcctttctacctctgatctccttctctgttactctctgactttctctttcaaaggggactaaaagtttattgattcttttagttaggccaagaagcaaaacatggtatagactgtgagaggaatttttggcagaagaaaaattgattagtattggtaattcctgctatgtttctgtcataaatatttgttttcaattttgacaggtatgaacatagacagtgaaactaaagcaaataatggagagaagaatgcccgacagagacttctggattcttcttgctgatgatttttttccttgagctgtaaatctgtgacttctgcgacatgggatttaatttggctaaagcacccctgttggtttcacagctggtttgcaataaatggttcttggtggagatactgagcatgtcttattgagtccctaatggaaatggtgatcaacaaaaggttatggaagaatggtttatgaacttcccataggaagcacctgagagatagtaaactgcagcaagtaactatgtgtaagtcctcatcaaatgaaaagcagaaagacaagaacaattagtcaagagcagtagccctgtcagagcctcggagcaatacctttctgtacccgtggtgagacaagacccagagctactggaaaacaagcactttggaagatttgttttgttttcatggaataataatatgtcagggtataatttaacgtgagtttcttatgtgcccttaaagactgttagacaagaaaagcattcactggctaataatccataggtcgacctatgtcctaagttaggtgtaaggtccgatgccttggcccacactcgagctctctttacattgttagttgtcaaccttggctgatggaaatcccgtaaccactatttgttgcactgtgccttgaagggcagcaggcccaagtgctgctctgactgaaaactgagttaacaagatgaaatctaaaggatattcacagtgacttcaattcaggaagaatgcttccaaaagagcccagtggggaaatctgacatcacagaagacattaattcagtcactttcaaagagtttgtctacaggcggtttctctgttatcaaaggcatttgaaataggattttacttaaacaataatggaacacaggagtatttcaagtgaagaacactttgcctgaatgtgatcagggcacataagtgacattggcatgcttcatatggcgtgcttggagccagaaaaacttagcggtttattttgtttatatttaagcacagctttaaaaaattcattatcgtttattcagtgtccgaattgaggccatttgggaagaaaattctagcactggtggagaattatagaataaagattataaatggttggataagacaaatgtaagcttatttcataaacatttaaagctgattcagaacatgttaaaaactgttcccaattccaactatgtaaatagatcctatgttcacattttacacacacacacaaaaatctttaacatctgtggaacttcccagttttagtcttagaaagttagcatgttgcataagttcagtaatcctcaggaacctccaagtttacttttagctcttacggacagttgtttacataatctaattactgttttctgaagaacggaaattatataagctgctgtctgccttttggaatattcagaaaagcagattttatttgtacttctgtgatgttttctgaaatggaaagctgatgataaatatcaaagtagcaatcagtgcgttaaattattctgttacatgatatttattactgttgaattattctgtgacttagaaatggcagtaacctaaataatggaatttgcaaaattattatattgccgtatctgagatgttccatcacaagtttctacactggtttcttttgaaaatttaaaaagatttacgagatacattttctaggatatgattttttttttacaaaaagcttcatcttctgtagactatccttaatttctattttgaaacggtaaaaattgatattttaggacaccaggaagtctccaagccattcccactctctgaactccagtagggtctgtgatgtcccaggcaccagtaccaagttggatgtgcagatatgcataggcaggtcccatccttgaggacttcagagtccagtaaaaggcagcagaaacatgggctggtgcctaagaggagaaagcgtagccacagtaaaggctatgccagaaaactcctagcaaatgctctgtgttcttgggagagggcacattgtttttgttttctctcctatagttcctgtaactgctggttttgagaatatagtaatcatttttcccagaggcagatgaccaccttaaggttctttagctgcaaatcctctaggttgaagtttgtgtgaaatagtcacagtgattttgaatagtaaggaatccagttgccttttgaaccttccctcacagggatgagagaacaagcctgtggaggttgtggagctactggtaaacaactgtcagggccccagaaggctgatgtggaggcctggggatacatttcatctaataaaagtattactaggtatcagtatcagtaataaaagtattataataaagtatcagtaataaaagtattataataaaaagtattattaggacaggtaaactcatccatctactgtgagctgctggcttggagaacgacttttgaggagccagtttcctgaggagaaatgcttttataaagcactcattgctttgtaaaaggagacaaaactgatcctaaatgaccactccagggttgctgattttgtttctggctcatgtctgcctagtaaaccaccagcaagctgctgaaccaggctggaaacaacattgttgcaactgggagggacatagagtactgtgaaagcagcgttccaacacatcttcacttttacaaagggataggcagagacttccaacatagaggttcttaaacttcgaggggttacaatccccttgcaaatatttttatagctatggaccctctcctcagatctacagccaacattttcagtgcaccttaggaggtcattttagtccacgcctctgaaaaagctgcactccaacggctgaagagcaagccatacggccgagaatggggctccctttgccttcatgaaagctacttcccccaacactaagactcagctgtacgtttgcttagctcagtcacatttacattcttctgggtgaactgtaccttttgagtacctgccttcattttctagaatcagacctaacaaggtcagtagaagcctgggcagcagcaggcctggaaagacgaggcagccagcatgaactgctgttctctccctgaccacaaggcgtcgtcttcctccagggtcaagtaattgttcttgttccgcctcacaggaatgtggggaggaaggacgtaacactataaaatgctgcgtcctaccttaaacttgtactgtgagaaagctggaaacttccacctgtacagtgggtctggtttgcatgtttagtttcatttgtgggaactgcttgtccaagagtgagctcaggtcagggcagtttgtgcctatgagaattagctcagctatcaggcaggtttttagacacctttttaaaatgtgctcgtgtttggtttgttttgcttactgtcagtcctgggtcaatcaaaggtttgtaagggtgagaatttttatgcactgctatatcgcaagtgcttaaaacagagactggcccagatgaggcattcttcaaatgtttgttgaaatgaatggacaaactcttaggataaatcctaatttgttggcaactgttatttgattttagaaggcaaactgattttattttagagaggggaaggggaggggaggctcattagcctcttggtagaaagaggactatttctgcaaatgaataggtttccaccttaagtagtgacagtccttaacttcttattatggagtgagtcttgaccgctttccaagttcaatagaagttcaagattgcctctcagtgattagggaaattgaagcttttaaagctcctggtctcagtaattcctcagaataaacctctttaaaagggatattgatggaaatgtacaattaccagtaattgaggttttatctgaggggatggagatgatgaaatggttccttcttggaagttgttggcattttggctttatttttcacaaataaagtgaaaccatttaaaacgattgacaacgattatatagtgccatgtggaatacaatagatattaatttgtggttggtttttctgcctgctttaaatgaaatgtattatgtttctgggttccttttttagctgtaaaaatacttcgtcactaaagcatgaaatttaatcagcagttgttcttcaagttcctgaaagctataaaagtttctcatgacttgagtggttttttccctgcccaccagaggagaaagcccttgtagaattctgcagtgttacaagtgttccctacaaaaactgaaaccatcagctcctctttaacaagttggctttttaaaagcacgtaattacaatttaatggtattctgtaaagtggtgctttaggcataatttaaattctttttaatgactatatttcttcaaaactttgaaagaaaaatgtgttctttttgctgcatcctttgtaagaagactgccaacagaggaaaaaggactttacaaattaagaccatcttggtttcatttccacaaagatgagaacaaatcatggtgttaggaaaggatccttagaagaacacaagaatttgaaagcccttggtggttatcactactatatttcatatttccacagaagtgacttagccaagctctgcattttgagcctgctgactttcatttaaaaggaatgaaaggctgaaaatccaggctgctgtgtctgtagataaaggtcaaaccatgtttgagttcttcactgttgtgtccacctaaataaaactgagtaagtaatgaaaaa

SEQ ID NO: 1182 - DNA, 6649 bp, Homo sapiens
gagcaggacatcccgctggtggagagctactcctttgaggtaagtaaggatggctgttccctcccctgatgcttgtggtcagtgcccaggagggtcacgaggaacgagctctctcccctgtgctgcaagagcaggcggccccacaagtggacaactggtgctggcctgtgagccctgagccgtcagccccacttcgagccgtggccctgcagaacctggctgttgctgccactggagcccactgtggcccacatggcctggcgacagtggtcttcctcactttcaccccagctgccagctcctcttgaaagcaaatggaatgttctcatgtttgtgattgtgtcacgtggaccatgtctgttagctcgaagaccctgctctttagagctagccacctctgctgggcctgccttagcagtccctcctggctgcccagctgcctcccgttctctgctctcatggggtcttcctgcctcttcccagcttccattcctgccgctgagcttggcctccctcaccatcctttatctctgtgccccacacattcacagtagtgacctctccagggggttctctatctcactgcaccgtgggctttttttaagggtaggaaaatgtatttgtctatgtcccattgtattttgcagagttgtttgtgagtgtttcttgctcgaatagacagagtggtggtgggccacgctggcccctgggagccatgtgcctgtgggaagctctgcactccccagggtctcagggacagggctggcatttgtccctctggcttgcttgtttcacttggtttttctaagagggaattgaagtgttgctgagaattggaggttttttaacagctctttcccttgttccttctcaggcccgaatggaagtggatgcagatggaaatggtgctaagatatttgcctatgcctttgacaagaaccgaggaaggggctctgggagactccttcatgagctgctgtggtgggtgtttccaagctgtctctgccccccgccactgggctcctgggtgagctccgatggcacagggcgcctggagccccctgccccgctgaagccctgccttgccttccctgaatctcgcagttatttttgtgtccttcaccactaacccaaaggaacgaatgatttgtatgttgcacttcaaacaccaagtggactttctgctgggagcttgcccaggaccggcagcctctggagggacggtggttgctccccttgctgggttttgccgagccccccggtgtgcatggtagggaccactcagatggggagctgtctcgaggccatctgcttaggtggttttgcgttccagctttggctgtctgtgctctgaagtccaggggccgggtcctccctgtgtccctgtcctgtttgggccacagatcaggtgcttgggtttctctcagcagcttccgcctgaggtaccctcatccaaaggaccaggggcccgatcagatcacatggctgacatttcttcctggaaggactttggtacctgaccagaaatgtctgtgagggtgggaggcagcgatgcagggttagatgcagggtttgctgtctgtttctagggagcggcaccgggggggcgtggccccgggcttccaggtggtgcacctcaacgctgtgaccgtggacaatcgcctggacaacctgcaactggtgccgtggggctggcggcccaaggctgaagagacctccagcaagcagaggtgggtcttctcagggcctggcgatgccagcagaggcgccttttgaggagggccaccgccaaagctcttgtttccaagagggtctcctgttcctcctctgagccctgatgcttctgtgtattttgggaatttcattgtttttccccaaagcgtggaatcctccttttcttcatgggagcgggaaggatcttgatggtgtgtgtttttgcattgctcctcttataattggctctgggaacctccctttagctggcatgacagtggggagaagggctgcctgctccagggcagggccagcgtcgggactcggtgtgagcagggcttctgccccacacccctgggaggcatcagccttctctcctcacctcaggattccttccttctctgctcacctcaggattccttccttctctcacctcaggattccttccttctctcacctcaggattccttccttctctcacctcgggattccttccttctctcacctcgggattccttccttctctcctcacctcgggattccttccttctctgctcacgtcaggattccttccttctctcctcacctcaggattccttccttctctgctcacctcaggattccttccttctctgctcacctcaggattccttccttctctgctcacctcaggattccttccttctctgctcacctcaggattccttccttctctcctcacctcaggattcttttctgtgcacacagatgggtctttttgttgtgttcttttgctaaacagttttccttaagcaaaggtttaaagcggagaatggttcagggctcagccctcggcccccgacctgcctgtgatcctgaaagcagtgctttgcatgggcttcccacctgggagggcggttcctgctggccctagaaccagccagtctgtgaacttcatggagcccttgggaagagccaagggaccagcaggataggggttgggagcccagttgagccagggagtccccagccacacacgcttcactgacatgttcccctggcgccctggggcttttgggcacgtcctcaagcctctgggcagcctttcctggtgcaggcagtgcgaactgccctagcagatggttgtcagcaacgctggtaaggtttagtgtttcgggcttggtgatggttggtggctgtgggtagaatctttgcagttgtcacctcagagtcatgccagagccctgggcagccgaggtggaaacagtgggagcacctgacacactggttggtgatgtggggacagtccccaggcctccaaaatgccactcccaaactgctgttcctgccaccctggagggagtcctacaaatccccccccatcccttcctcactgggcctctcaggacgaaggcagagcctgaagtgtctttcgttcttgttgggctggtgtttttttttccctgctctgtttatttcattaaattaattaattttacggatgggtctcactatgttgcccaggctgttcttgaactcctggcttcagggaatcctcttgcctcagcattttttttttttttttttttttgagacggagtctggctctgttgcctaggctggagtagcgcgaccttggctcgctgtagcttctgcctgcccagttcaagcaattctgccccagtcttcctagtagctggggttacaggtgcccaccaccacgcctggctaatttttgtatttttagtagaggtgggattttgccatgttggccaggctggtcttgaactcctgacctcaggtgatccgcctgcctcagcctcccaaagtgctgggattacaggcgtgagccaccacgcctggccccgcttcagcctcttgagtagctgggattacgggtgtgcaccaccacgcccggtccttgctctaatattagagttttgaccttcctcatactgcttgtgagtgaagccaggcctcttacgattgttgaatggggtttttattctttcggggattatgttagttggaactttgggttgcaagaaacagaaacaaaggtcaatttggctgaaacaaaaatagggtacattttggtatcctgactgaaatgtggagagccagggatgctgctgcctccagctctgcgcccccactcccggctcctctctgggaggcggcatgggcactacctagcacttgcggactgaagcaggcaccctgttctagtggtgtctggggaagccctgggatgaactgtagttagcttgcttagaatcacttttctacatgaaaagggaaggggaaggggaaggcgtgcttggcaggcagagcagcatctgtagcatctcctcctgcgttgtcccacattgatacatgctcagtgttgatgctgggatgggcccttcccaactccgcaagttcgcccgctgctcaccactccacctggcaatgccttctgtccctgccatggtgcgggtcatttcagccggttctcaacaagactcagggtccggccagcctgtgactgaatgttaccttgaatcctctcagcaccctttataatcaggagaggagataactgccgttaagaacagccgtttggaaagggggtgttgggctgatgctcctggtcagcccattctctgtgggcacggcaggatgcccattctctgagggcacagcaggacgagttgcgctggggctgctgccttacacaaccccctgctacaggaggtgggcctggggtggctcaggactgatcaggctcagccatctttggtttgccaacatggggttttagaacccagcaggtgttgggcctcttgtgctgggtcagcaccccaggccccgagcagaagtcagagctggccagtgtgggcctgacatcctgtctggctgggtgctgtgtgtccgtctggatcctggtctgtggcctcctgtgatccagctctttgtggtggggtcaccctgtctttgttgactggctgggtgctgtgcgtccgtctggatcccagtctgtggcctccctgtggtccggctctttgtggtggggtcaccctgtctttgtcaggcctgggctattgctttgctttcctggcactgtgtcagctcagcccccacaaaaggggcctcttggcaaaggggtgttttcctgttctgtcttcagaagccagcagtgtctgaaacttgcctctgtctggtgggacctcaccaacatcttcccatgtcctgatccttccccgttttaaccaagtctcctcagggtctggcttcggagaacggggttggtggggtggtttatgcagcttctttactccgtgatgcagcagggctggggctgcccacgcttgcctctgagcagccagtgctcgctccagggcctgttctgtacagcacatgcctttgaggctccgttcttggtagaactctcccgttgtaggcatctggcctactcaagcaggaggagtttttagacggacgtatggcagctcccggtatggaaggggaagtggaccgacggggcagtaatgggcacctctgcaggtcaagggcaaggagaggggccgcctcgctttgcacaggggcctgacctgggccctgtctcctgcctactgtgtgcctgtcagtcccaggtgctggggagagggtgatagatgaggccatgcttacgggttagtgggaagatgagacacaatatttactgtcaggtggtgaaaagcacatgcagcagggatgggccaaaggagactcaaactcgggctgggtgtcctgggcaggatggcactctatggagtcattgcatcgtctgctgtgtgctggccccgtttggccagagtgcactcaagtgtctgcttctttctttaagggagcaaagcttgtattggcttgcaattcagcagctgcctacagaccctatagaagaacagtttcctgtcctaaatgtgacccggtattataatgccaacggggatgtagtggaagaggaggagaactcttgcacctactatgagtgccactaccctccctgcacagtgattgagaagcaggtgggtgtgctgcagtgcggtcgcgtccctggcacctctaccctgtagcccagccttggtttgggatcttgccctccaccgcggggtcccattccccagagaccgcttagcacctcttgggcttttccaccagagtggtctccctttgcccttgtgctggcctgaccagggcccaggccctccagccttggtacgtggtgttttgctgggtccgtcagattgtccgtaagatgcagcctttgccccacactgcgtcccaggcatgatggtgaagccacaggtgttctgtatttcagctccgggagttcaacatctgtgggcgctgccaggtggcccggtactgcggctcccagtgccagcagaaggactggcctgcccacaagaagcactgtcgggagaggaagcgtcccttccagcatgagcttgagccagagcgatgacgggcaggggagccacacatactcacagcccccgggctctaccctgggcacagcagagacagactggtggttgaacctggaggtgccaaaaaagccagctgcgggcccaggacagctgccgtgagactcccgatgtcacaggcagtctgtgtggttacagcgcccctcagtgttcatctccagcagagacaacggaggaggctcccaccaggacggttctcattatttatatgttaatatgtttgtaaactcatgtacagttttttttgggggggaggcaatgggaagggtagaaattacaaatagaatcatttgctgtaatccttaaatggcaaacggtcaggccacgtgactaaaaactgtcctgttgtcgaagcttctcccctgggccgccgggagccccgtggagcgcggcctgcacgggagttgtgtccacaaaggcaaagtaaaggggtggaatcatctggc

SEQ ID NO: 1183 - DNA, 1282 bp, Homo sapiens
ttagtgggaagatgagacacaatatttactgtcaggtggtgaaaagcacatgcagcagggatgggccaaaggagactcaaactcgggctgggtgtcctgggcaggatggcactctatggagtcattgcatcgtctgctgtgtgctggccccgtttggccagagtgcactcaagtgtctgcttctttctttaagggagcaaagcttgtattggcttgcaattcagcagctgcctacagaccctatagaagaacagtttcctgtcctaaatgtgacccggtattataatgccaacggggatgtagtggaagaggaggagaactcttgcacctactatgagtgccactaccctccctgcacagtgattgagaagcaggtgggtgtgctgcagtgcggtcgcgtccctggcacctctaccctgtagcccagccttggtttgggatcttgccctccaccgcggggtcccattccccagagaccgcttagcacctcttgggcttttccaccagagtggtctccctttgcccttgtgctggcctgaccagggcccaggccctccagccttggtacgtggtgttttgctgggtccgtcagattgtccgtaagacgcagcctttgccccacactgcgtcccaggcatgatggtgaagccacaggtgttctgtatttcagctccgggagttcaacatctgtgggcgctgccaggtggcccggtactgcggctcccagtgccagcagaaggactggcctgcccacaagaagcactgtcgggagaggaagcgtcccttccagcatgagcttgagccagagcgatgacgggcaggggagccacacatactcacagcccccgggctctaccctgggcacagcagagacagactggtggttgaacctggaggtgccaaaaaagccagctgcgggcccaggacagctgccgtgagactcccgatgtcacaggcagtctgtgtggttacagcgcccctcagtgttcatctccagcagagacaacggaggaggctcccaccaggacggttctcattatttatatgttaatatgtttgtaaactcatgtacagttttttttgggggggaggcaatgggaagggtagaaattacaaatagaatcatttgctgtaatccttaaatggcaaacggtcaggccacgtgactaaaaactgtcctgttgtcgaagcttctcccctgggccgccgggagccccgtggagcgcggcctgcacgggagttgtgtccacaaaggcaaagtaaaggggtggaatcatctggc

SEQ ID NO: 1184 - DNA, 245 bp, Homo sapiens
gcgggtgagctcagaccttcctgagtccagcagggagtatgagtgagactctgtccttgtcttgcggcaggagtggtggggttgctaagtcagctgcccgctgttttatggggagtaggatgctctcgcccctgacattggttagttcttgcctgatttatgcatgaagtggctgggagctcagcagtgagcttctgcccagaagaatccacagggcatgttcagcaggcctgctgcagatggtg

SEQ ID NO: 1185 - DNA, 245 bp, Homo sapiens; identical to SEQ ID NO: 1184

SEQ ID NO: 1186 - DNA, 5242 bp, Homo sapiens
ccctgactggcacttgaattggttcctgcctgagttactccttctattctcccttctctacactccatcacttccaggagaacatgagctccaaagtctgccagctgctttaactttcctttcagaagtcgcagagtgcagccttctttgtaaataaggtcaaggactcacaacccccacatttgcaaacttttccaaagctgtccttgacagagttccaagtccttggtgtcctggtggggctgtgtgagagtgcaagtcaagaagacctgaccttgaattctggctctatcaccctggggcgaatagtagctcctaccttctaggttgtgtgagaattaaaagagataatgcatattaaaggcaaaccacagtacctggcttatagtaagcactcaacaaaccttagcttgaacaaaacgaagcagctttaaaaagcatcaggagagcagaggaaaacccctttctccatgtgccagtttctccttggtcccctccaggtctgagacatcttccagggactttgccaatgctggtttttcttggcgtgctctcaagtgatgactcttaaatgtctaactttaggtgaggtttttttcttggttgttttgtgtatattttttaaggtacggtttaaatggtaaaaattgtttatgtgactacaaaggatatttcattctgagacttggaagtataggttaaatagatgccccaagtagattttcaattattcagccttttcttatttaattaacttattgatcgagcgtcttgtttctccaagtaggagcagtgtctctttcagcaggcaattttgcgtcttagaagttcaagacctccagagacatagccagcttttctgcagctctctcagcggtgggtcagtcctgctgatgtggggatttggcccacggcacagcgatctgtgtgtgtgaacaatattggaaatttcaactgtgggtttgccctggggaaatacaaacaaggaaaacttaatggggctctaattggtggggcaatgtagcgtagaagttgtagacaagcctgtccattagaaagcatagagcgatctgagagcataaacaatttggcctggctgaaatgtgggggctgggtgcgagagtggcagaagatgaagctagaaaggctaggtaggcaatgactagatcctgaatggcttaggatcccatgttgagtttattttattttattgagacagaggccttgttatgttggccaggctaggttttgaaatcctggcctcaggttgtcctcccacctcagccttttgagtagctgggactacgggcatgagtcaccacacttagctccatgttaaggagtttagatgttgtttttaagctgacaagaatcctgcttgtttttctaagcaggagagtgacatggtcagatttgcattttatgagattactctgatgttagtgcagtgcttctagaacttcagtgtgcatgagaatcatctggcaatcttgataaaatgcaggttctcattcagtaggtctggggtatgacctccatttttgccttttgtaataaactcccaggtgatactgatgatgcttgtatgtggtaatactttaattaccgagtagagttaagaatcacttaaagttaagtgtttcttaaactttaagggaatcacaataacctggaggggtggttaaacccagagtactgggcataacccctgcagtttttgattcagttactctggctggggccctaacaggttcccaggtgatgctgatgctggtggtctggtgaccacatggagaaccactgaagtgaatcattgatggatggacagtaagacctaatgggaggggccaagtcaggaggctgtagctggagccctggtgtaacaggaccagggctatacctaaggcaatactactgggaatggaagagaaagggcagattttactgctaggtgatatcagcagggcttggtgaccgaccagctgtagggagatagggaagagtgacattggaggcctggttcactgagccagtagatcagcaggaacagcaagcttaggttgggcagtgattcattctagaaattctgaatgtgccaaagagagttgacctccacagaaaagggtgcagtcaggaagataagtgtctgcatatggtaccaactctgctgaagcaaatttgccatgtgactgccggcaatatatcttcatatgcttcattctctctaaccacaagatgaggctattttgccttttctgcttctagggatgaggcaagacttgcaatgaagcatgcaaagcatattaaacccatacaaagaaagagacatttaattaccaagcttaagcttctgtcttttcctcccagccatccaaaattacatgacaacatgcccactatattctgggaagtaaaaatctcagcaagagctcaaagctgtttgctgtcttctcatcatgtccctcccttggtagtttatttgatgaagttttaaaaacacttgaaatgttttactaaaaaattgtacatgactcaccgggacctctgttcaagatttcatcaggcaacatggttagaaggtcatggtcatcattccttggggtgctttgaagggttttcttggctttatggtcccttggactttgcttattaattcttgcctctccatgaagacttttctttaactccatttgggcctgaaaatcatcaactataaatgatcaatgttcttcccaagctactttcaccagactagatcaacagatcagccactttgcaagttgtgtgcttatctgtagacatctgcagtcctctaaccagaacatggttttctttttcctattagaaggtatgggaactttatttattgacaggcttgttaagagaaaggtgagtgcacccagtctcaaaaaggtatggctcaattaagatgaggacctttacaaaagtgtgtttctgtcagctagctgatatgattggagttccagagagcagtaactaaaggctcatttcctagagggaggaatttggaacatgacagttacaggcattactggtaaagggtttttttgtttgtttggttggttggttgttttttttacaagaggtctttcttgttagataattctatggcaagaattatagagagaggcctaggtatcagaataaagaacaactcaccccctcctcctttcactaaaccaagaaaaatgatctagccccattttcctatgtccagaatgtcataggagcaaactgtttttaaaaatggagacttgcgacacagatacacagatacaaacttagaaaagactcaacaaggttatcagcagaaggaatcttcctgattcttctcagctttagtagttgaaccttcaacctcaatgacgaaatttaaaatgctaagtaaagactggctatctatgcttgatatattcatgtggcagggcagtgattatgtgatgaaaatttggtaaatatgacactcttctcgtatttacctcttgtcttttacggatcatttccagcacttgcatcttatgcaaatattgtctgttctcagaagtatacattggagtttgcattttcttttctagtacctgctatgaaagacaacacacttgttagtatggggtaatttgttactgactctgcaattcacaagtttagatcctttttgaaacagagtcagatcttaatcagtcataacctgtagagatatcttgtgatgacaaaagtggactatcgtgtgtccctgacaagtcctttgtgtcactatcaatgaatgaagtggctctttgatgtgtatatatgtagttttttaggttgctatagagttttgtaaaccttaaatgggaatatctttccacatctcatttttggcaagatatcacttcctttgtaaacagatgcttattaccacctctccagaattgtgttctggtttgaggaaacctttctttttctccctgcctcttttaccattgagtaattggctggctatgaaatgagagggaagctgctgaatggtgaaatggaacctatttctatagagtgcatttccatatgccagcataagccttggagaatattgcagtttagggaggatttgaagttgattatttgtgactctgaacatctccccgccagtgcatcataaactccagtgggacagtgcagacggttattgagggcagccagaggtcaatataccttcatttgtcatttgctgttgccaggaaagatgatgtgtttgacaataccttttgtgttgctgtgtggatagtgactgtcagctgatgtgaacctcagggaggggccatctccacagatgctgtcagcaccacaaacgtgggcttgaggatgtgacagcacctggacatctttgtcaagtcagccagccacacagcagcacctagcaagctccaaaacaaattaggagtggaaagtgttgaaaatctgcttctacctctaagctttcatttctatgtgaggggagttctagtcaacagaacattataagtgcatagcagggaaaagatacacagaagacatttcccaggattaatttttggtgaggttgtgtcaaataagtcaggaataacttgtagataagatttctcctgcaaactgagaataaaaagttttaaactgaggggaggaatgaaagggaggacttatgctgaatttttcacagatttgaaaacttcagaatcaccaatttctaagtaaaagtcttttctcatctacattgccctggttttcaacacaaagcagaaaagggtgcagagctcatgcaagaggtaatagccactgccagttggaggcatgcacagaagagaataaatagctttgaaaagttctcactctgaatgacttaacagtttgatttgtctttgaactcctccatgcagagagtgcatgaaaggaccagtgtgctccagtgccccaatcctgtgtcgcccacccccagttcacctccctgtcaggttactgctgcagctcacctttgctttgtgcattgtcctggcttctcgctggctcaggagtcttcctgaagtaattactcgtggcaagtcaatgggttcaagcttctagaagttcaacgtttagagcagtcagcattcctcatgccatgagatgatgaaacagaaaagccagacattaaattatcttaacactttgcaaaagcggcacttatttctgagagcatacaggaaaggtgattctaacagcattacag

SEQ ID NO: 1187 - DNA, 5242 bp, Homo sapiens
ccctgactggcacttgaattggttcctgcctgagttactccttctattctcccttctctacactccatcacttccaggagaacatgagctccaaagtctgccagctgctttaactttcctttcagaagtcgcagagtgcagccttctttgtaaataaggtcaaggactcacaacccccacatttgcaaacttttccaaagctgtccttgacagagttccaagtccttggtgtcctggtggggctgtgtgagagtgcaagtcaagaagacctgaccttgaattctggctctatcaccctggggcgaatagtagctcctaccttctaggttgtgtgagaattaaaagagataatgcatattaaaggcaaaccacagtacctggcttatagtaagcactcaacaaaccttagcttgaacaaaacgaagcagctttaaaaagcatcaggagagcagaggaaaacccctttctccatgtgccagtttctccttggtcccctccaggtctgagacatcttccagggacttcgccaatgctggtttttcttggcgtgctctcaagtgatgactcttaaatgtctaactttaggtgaggtttttttcttggttgttttgtgtatattttttaaggtatggtttaaatggtaaaaattgtttatgtgactacaaaggatatttcattctgagacttggaagtataggttaaatagatgccccaagtagattttcaattattcagccttttcttatttaattaacttattgatcgagcgtcttgtttctccaagtaggagcagtgtctctttcagcaggcaattttgcgtcttagaagttcaagacctccagagacatagccagcttttctgcagctctctcagcggtgggtcagtcctgctgatgtggggatttggcccacagcacagcgatctgtgtgtgtgaacaatattggaaatttcaactgtgggtttgccctggggaaatacaaacaaggaaaacttaatggggctctaattggtggggcaatgtagcgtagaagttgtagacaagcctgtccattagaaagcatagagcgatctgagagcataaacaatttggcctggctgaaatgtgggggctgggtgcgagagtggcagaagatgaagctagaaaggctaggtaggcaatgactagatcctgaatggcttaggatcccatgttgagtttattttattttattgagacagaggccttgttatgttggccaggttaggttttgaaatcctggcctcaggttgtcctcccacctcagccttttgagtagctgggactacgggcatgagtcaccacacttagctccatgttaaggagtttagatgttgtttttaagctgacaagaatcctgcttgtttttctaagcaggagagtgacatggtcagatttgcattttatgagattactctgatgttagtgcagtgcttctagaacttcagtgtgcatgagaatcatctggcaatcttgataaaatgcaggttctcattcagtaggtctggggtatgacctccatttttgccttttgtaataaactcccaggtgatactgatgatgcttgtatgtggtaatactttaattaccgagtagagttaagaatcacttaaagttaagtgtttcttaaactttaagggaatcacaataacctggaggggtggttaaacccagagtactgggcataacccctgcagtttttgattcagttactctggctggggccctaacaggttcccaggtgatgctgatgctggtggtctggtgaccacatggagaaccactgaagtgaatcattgatggatggacagtaagacctaatgggaggggccaagtcaggaggctgtagctggagccctggtgtaacaggaccagggctatacctaaggcaatactactgggaatggaagagaaagggcagattttactgctaggtgatatcagcagggcttggtgaccgaccagctgtagggagatagggaagagtgacattggaggcctggttcactgagccagtagatcagcaggaacagcaagcttaggttgggcagtgattcattctagaaattctgaatgtgccaaagagagttgacctccacagaaaagggtgcagtcaggaagataagtgtctgcatatggtaccaactctgctgaagcaaatttgccatgtgactgccggcaatatatcttcatatgcttcattctctctaaccacaagatgaggctattttgccttttctgcttctagggatgaggcaagacttgcaatgaagcatgcaaagcatattaaacccatacaaagaaagagacatttaattaccaagcttaagcttctgtcttttcctcccagccatccaaaattacatgacaacatgcccactatattctgggaagtaaaaatctcagcaagagctcaaagctgtttgctgtcttctcatcatgtccctcccttggtagtttatttgatgaagttttaaaaacacttgaaatgttttactaaaaaattgtacatgactcaccgggacctctgttcaagatttcatcaggcaacatggttagaaggtcatggtcatcattccttggggtgctttgaagggttttcttggctttatggtcccttggactttgcttattaattcttgcctctccatgaagacttttctttaactccatttgggcctgaaaatcatcaactataaatgatcaatgttcttcccaagctactttcaccagactagatcaacagatcagccactttgcaagttgtgtgcttatctgtagacatctgcagtcctctaaccagaacatggttttctttttcctattagaaggtatgggaactttatttattgacaggcttgttaagagaaaggtgagtgcacccagtctcaaaaaggtatggctcaattaagatgaggacctttacaaaagtgtgtttctgtcagctagctgatatgattggagttccagagagcagtaactaaaggctcatttcctagagggaggaatttggaacatgacagttacaggcattactggtaaagggtttttttgtttgtttggttggttggttgttttttttacaagaggtctttcttgttagataattctatggcaagaattatagagagaggcctaggtatcagaataaagaacaacccaccccctcctcctttcactaaaccaagaaaaatgatctagccccattttcctatgtccagaatgtcataggagcaaactgtttttaaaaatggagacttgcgacacagatacacagatacaaacttagaaaagactcaacaaggttatcagcagaaggaatcttcctgattcttctcagctttagtagttgaaccttcaacctcaatgacgaaatttaaaatgctaagtaaagactggctatctatgcttgatatattcatgtggcagggcagtgattatgtgatgaaaatttggtaaatatgacactcttctcgtatttacctcttgtcttttacggatcatttccagcacttgcatcttatgcaaatattgtctgttctcagaagtatacattggagtttgcattttcttttctagtacctgccatgaaagacaacacacttgttagtatggggtaatttgttactgactctgcaattcacaagtttagatcctttttgaaacagagtcagatcttaatcagtcataacctgtagagatatcttgtgatgacaaaagtggactatcgtgtgtccctgacaagtcctttgtgtcactatcaatgaatgaagtggctctttgatgtgtatatatgtagttttttaggttgctatagagttttgtaaaccttaaatgggaatatctttccacatctcatttttggcaagatatcacttcctttgtaaacagatgcttattaccacctctccagaattgtgttctggtttgaggaaacctttctttttctccctgcctcttttaccattgagtaattggctggctatgaaatgagagggaagctgctgaatggtgaaatggaacctatttctatagagtgcatttccatatgccagcataagccttggagaatattgcagtttagggaggatttgaagttgattatttgtgactctgaacatctccccgccagtgcatcataaactccagtgggacagtgcagacggttattgagggcagccagaggtcaatataccttcatttgtcatttgctgttgccaggaaaggtgatgtgtttgacaataccttttgtgttgctgtgtggatagtgactgtcagctgatgtgaacctcagggaggggccatctccacagatgctgtcagcaccacaaacgtgggcttgaggatgtgacagcacctggacatctttgtcaagtcagccagccacacagcagcacctagcaagctccaaaacaaattaggagtggaaagtgttgaaaatctgcttctacctctaagctttcatttctatgtgaggggagttctagtcaacagaacattataagtgcatagcagggaaaagatacacagaagacatttcccaggattaatttttggtgaggttgtgtcaaataagtcaggaataacttgtagataagatttctcctgcaaactgagaataaaaagttttaaactgaggggaggaatgaaagggaggacttatgctgaatttttcacagatttgaaaacttcagaatcaccaatttctaagtaaaagtcttttctcatctacattgccctggttttcaacacaaagcagaaaagggtgcagagctcatgcaagaggtaatagccactgccagttggaggcatgcacagaagagaataaatagctttgaaaagttctcactctgaatgacttaacagtttgatttgtctttgaactcctccatgcagagagtgcatgaaaggaccagtgtgctccagtgccccaatcctgtgtcgcccacccccagttcacctccctgtcaggttactgctgcagctcacctttgctttgtgcattgtcctggcttctcgctggctcaggagtcttcctgaagtaattactcgtggcaagtcaatgggttcaagcttctagaagttcaacgtttagagcagtcagcattcctcatgccatgagatgatgaaacagaaaagccagacattaaattatcttaacactttgcaaaagcggcacttatttctgagagcatacaggaaaggtgattctaacagcattacag

SEQ ID NO: 1188 - DNA, 5240 bp, Homo sapiens
ccctgactggcacttgaattggttcctgcctgagttactccttctattctcccttctctacactccatcacttccaggagaacatgagctccaaagtctgccagctgctttaactttcctttcagaagtcgcagagtgcagccttctttgtaaataaggtcaaggactcacaacccccacatttgcaaacttttccaaagctgtccttgacagagttccaagtccttggtgtcctggtggggctgtgtgagagtgcaagtcaagaagacctgaccttgaattctggctctatcaccctggggcgaatagtagctcctaccttctaggttgtgtgagaattaaaagagataatgcatattaaaggcaaaccacagtacctggcttatagtaagcactcaacaaaccttagcttgaacaaaacgaagcagctttaaaaagcatcaggagagcagaggaaaacccctttctccatgtgccagtttctccttggtcccctccaggtctgagacatcttccagggactttgccaatgctggtttttcttggcgtgctctcaagtgatgactcttaaatgtctaactttaggtgaggtttttttcttggttgttttgtgtatattttttaaggtacggtttaaatggtaaaaattgtttatgtgactacaaaggatatttcattctgagacttggaagtataggttaaatagatgccccaagtagattttcaattattcagccttttcttatttaattaacttattgatcgagcgtcttgtttctccaagtaggagcagtgtctctttcagcaggcaattttgcgtcttagaagttcaagacctccagagacatagccagcttttctgcagctctctcagcggtgggtcagtcctgctgatgtggggatttggcccacggcacagcgatctgtgtgtgtgaacaatattggaaatttcaactgtgggtttgccctggggaaatacaaacaaggaaaacttaatggggctctaattggtggggcaatgtagcgtagaagttgtagacaagcctgtccattagaaagcatagagcgatctgagagcataaacaatttggcctggctgaaatgtgggggctgggtgcgagagtggcagaagatgaagctagaaaggctaggtaggcaatgactagatcctgaatggcttaggatcccatgttgagtttattttattttattgagacagaggccttgttatgttggccaggctaggttttgaaatcctggcctcaggttgtcctcccacctcagccttttgagtagctgggactacgggcatgagtcaccacacttagctccatgttaaggagtttagatgttgtttttaagctgacaagaatcctgcttgtttttctaagcaggagagtgacatggtcagatttgcattttatgagattactctgatgttagtgcagtgcttctagaacttcagtgtgcatgagaatcatctggcaatcttgataaaatgcaggttctcattcagtaggtctggggtatgacctccatttttgccttttgtaataaactcccaggtgatactgatgatgcttgtatgtggtaatactttaattaccgagtagagttaagaatcacttaaagttaagtgtttcttaaactttaagggaatcacaataacctggaggggtggttaaacccagagtactgggcataacccctgcagtttttgattcagttactctggctggggccctaacaggttcccaggtgatgctgatgctggtggtctggtgaccacatggagaaccactgaagtgaatcattgatggatggacagtaagacctaatgggaggggccaagtcaggaggctgtagctggagccctggtgtaacaggaccagggctatacctaaggcaatactactgggaatggaagagaaagggcagattttactgctaggtgatatcagcagggcttggtgaccgaccagctgtagggagatagggaagagtgacattggaggcctggttcactgagccagtagatcagcaggaacagcaagcttaggttgggcagtgattcattctagaaattctgaatgtgccaaagagagttgacctccacagaaaagggtgcagtcaggaagataagtgtctgcatatggtaccaactctgctgaagcaaatttgccatgtgactgccggcaatatatcttcatatgcttcattctctctaaccacaagatgaggctattttgccttttctgcttctagggatgaggcaagacttgcaatgaagcatgcaaagcatattaaacccatacaaagaaagagacatttaattaccaagcttaagcttctgtcttttcctcccagccatccaaaattacatgacaacatgcccactatattctgggaagtaaaaatctcagcaagagctcaaagctgttgctgtctctcatcatgtccctcccttggtagtttatttgatgaagttttaaaaacacttgaaatgttttactaaaaaattgtacatgactcaccgggacctctgttcaagatttcatcaggcaacatggttagaaggtcatggtcatcattccttggggtgctttgaagggttttcttggctttatggtcccttggactttgcttattaattcttgcctctccatgaagacttttctttaactccatttgggcctgaaaatcatcaactataaatgatcaatgttcttcccaagctactttcaccagactagatcaacagatcagccactttgcaagttgtgtgcttatctgtagacatctgcagtcctctaaccagaacatggttttctttttcctattagaaggtatgggaactttatttattgacaggcttgttaagagaaaggtgagtgcacccagtctcaaaaaggtatggctcaattaagatgaggacctttacaaaagtgtgtttctgtcagctagctgatatgattggagttccagagagcagtaactaaaggctcatttcctagagggaggaatttggaacatgacagttacaggcattactggtaaagggtttttttgtttgtttggttggttggttgttttttttacaagaggtctttcttgttagataattctatggcaagaattatagagagaggcctaggtatcagaataaagaacaactcaccccctcctcctttcactaaaccaagaaaaatgatctagccccattttcctatgtccagaatgtcataggagcaaactgtttttaaaaatggagacttgcgacacagatacacagatacaaacttagaaaagactcaacaaggttatcagcagaaggaatcttcctgattcttctcagctttagtagttgaaccttcaacctcaatgacgaaatttaaaatgctaagtaaagactggctatctatgcttgatatattcatgtggcagggcagtgattatgtgatgaaaatttggtaaatatgacactcttctcgtatttacctcttgtcttttacggatcatttccagcacttgcatcttatgcaaatattgtctgttctcagaagtatacattggagtttgcattttcttttctagtacctgctatgaaagacaacacacttgttagtatggggtaatttgttactgactctgcaattcacaagtttagatcctttttgaaacagagtcagatcttaatcagtcataacctgtagagatatcttgtgatgacaaaagtggactatcgtgtgtccctgacaagtcctttgtgtcactatcaatgaatgaagtggctctttgatgtgtatatatgtagttttttaggttgctatagagttttgtaaaccttaaatgggaatatctttccacatctcatttttggcaagatatcacttcctttgtaaacagatgcttattaccacctctccagaattgtgttctggtttgaggaaacctttctttttctccctgcctcttttaccattgagtaattggctggctatgaaatgagagggaagctgctgaatggtgaaatggaacctatttctatagagtgcatttccatatgccagcataagccttggagaatattgcagtttagggaggatttgaagttgattatttgtgactctgaacatctccccgccagtgcatcataaactccagtgggacagtgcagacggttattgagggcagccagaggtcaatataccttcatttgtcatttgctgttgccaggaaagatgatgtgtttgacaataccttttgtgttgctgtgtggatagtgactgtcagctgatgtgaacctcagggaggggccatctccacagatgctgtcagcaccacaaacgtgggcttgaggatgtgacagcacctggacatctttgtcaagtcagccagccacacagcagcacctagcaagctccaaaacaaattaggagtggaaagtgttgaaaatctgcttctacctctaagctttcatttctatgtgaggggagttctagtcaacagaacattataagtgcatagcagggaaaagatacacagaagacatttcccaggattaatttttggtgaggttgtgtcaaataagtcaggaataacttgtagataagatttctcctgcaaactgagaataaaaagttttaaactgaggggaggaatgaaagggaggacttatgctgaatttttcacagatttgaaaacttcagaatcaccaatttctaagtaaaagtcttttctcatctacattgccctggttttcaacacaaagcagaaaagggtgcagagctcatgcaagaggtaatagccactgccagttggaggcatgcacagaagagaataaatagctttgaaaagttctcactctgaatgacttaacagtttgatttgtctttgaactcctccatgcagagagtgcatgaaaggaccagtgtgctccagtgccccaatcctgtgtcgcccacccccagttcacctccctgtcaggttactgctgcagctcacctttgctttgtgcattgtcctggcttctcgctggctcaggagtcttcctgaagtaattactcgtggcaagtcaatgggttcaagcttctagaagttcaacgtttagagcagtcagcattcctcatgccatgagatgatgaaacagaaaagccagacattaaattatcttaacactttgcaaaagcggcacttatttctgagagcatacaggaaaggtgattctaacagcattacag

SEQ ID NO: 1189 - DNA, 200 bp, Homo sapiens
gatctctagagaagctccttagtagtaatcactggtgattatgagacacatttaaaatgaaactgcagtgtgctaacacattttagagatgtccttttctagcaggggcttggcttgataggggagatcatgttggcatttcagggggtcactaagactgggcagcaattcatgtcaaccggtctgcctccagccggatc

SEQ ID NO: 1190 - DNA, 200 bp, Homo sapiens; identical to SEQ ID NO: 1189

SEQ ID NO: 1191 - DNA, 200 bp, Homo sapiens; identical to SEQ ID NO: 1189

SEQ ID NO: 1192 - DNA, 7035 bp, Homo sapiens
agctgacagctttaaagaccagaccttctttctcagccaggtttcccaggatgccctgaggagaaccatcttccctctggggggattaacgaaagagtttgtaaagaaaatcgctgctgagaatagacttcatcatgtgcttcagaagaaagaggtacgagtgagcagttgcctttgattagtgcctgtttccctttcccgactgcatggcacggagcagctggacctgtgggtcccgcaccacttccccttctccaggacctaacatcaaaggcgggccttggagcaatagatggaggagtttgctgaggcgcacggtacagggctctgctgacatcgggagcagcctatacgagactccttgcttttttcctctcctctgcccctatgtggtaggcagctttccccacagccttagcagctggtggggtgctcttgggatggcctgcctgccaggtgagtgccaggcagtgtgatgcagccccgagacccctggaggggcaggtgctgtgccgccgtctgcacactcatgtgccctgtcacccgcttgcccggcacagactcgttcggtgccatctgttcgggcgctgtgctgctgggccgcgaggaattggtgacgcgcacacagttccatcttcgcctccatggagcccgcccgcgagtgggggacacaggcaggaggccaatcagtgtaaacctagaaaatgtctacggagggaggtgtaggaccctgggtgggaagcaccagtggggtctgagagtagggaatggagatgccaaaaacggcctcaaaagaagtcacatggaacctgagacctgaaggaggagaggatccggtgtcccagagagggctgggaaagtccagatgagggaacggcagtgcaaaggccttgaggcgaggagaagccagggagccgctgtgggggtgcctgcctgtggccccagctcctcaggaggatcgagcgcacccaggagtttgaggacagcctgggcaacacagcgaaactcgtctcaaaaagagagaacccggagtgttggcggaactaggatgaagcccgtgggagggccttggggatggagggcgagggcgctgtgggatgagcctcacctcttcaggggccagtgcggtgggagctgttgctccttcgtgtctcttcctggtaatggaaacggccatacctttcatcagagccatcttccctgaagagcacgcccaccgcccgtcctcctctcctcttgttttccgtttccggtgtcgctctgtggtgggagccgcagggatggaagggcagtcttgagagacacaaaccagagtaaacgatgcagcccctgatggggccacggtggagagcgcacgccacccaggctccccagctagggcagatgtgcttgaggaaggcgcctctctcctctgactcccctggagccctcccctaaggccttagcttcaggcctggctttcctgctacctgccccttctctggtccctgtctctcccccactcctcgcaggacagtggcctgaaggacctgaccgggttctgctttcttccccggggcagctggtgtgagggtctcccgcgcagggtcagaccccgcgggccgagacaatgaggcgttctctaaggctctggcatcgtgtgcgccggctgtgactggcggccgagggtgccggtgggcagccgggcccctaccctggaagcaaagtgtggggtgaggccgggaggccccagggcccgctcaggacgtctgggtacagcttgggccaccgccacttctgctcctctcacggctgccgtcttctcatttcagagcatgggcatgtgtttcatcgggaagaggaattttgaacatttccttcttcaggtgcgtgctgctctttgacacaaagagatggggctgcgtgtctgccctgggcctagatctccgtcggtaatgacatgtttgttttccagtatctgcagcctcgacctggtcactttatttccatagaagacaataaggttctgggaacacataaaggtgaggtgcagactctgccacttgtcatctgaaatgcctagagctgtggcgtttcagctctgggagactagaccagagttcctgtcgtcccttccacttggctggagaattgtagaaggctctgtggggcggccgggggcgggcacggcctagggtggaacagttgccttgatggtggctgggtgcacttccagatgtggcctcagctgagatgctggagttcatgaaaagcgcgcctctgacttggaaggactatactctgtgagttacgtatcaagtccctgtaaaaagaatgatttccttcctgtgtaaggaaaatgttaaactacacaaaactccactctgattcagggagtaaggtggacgtcccggcatggtgtgaatgattaaggaccacatgcagcgatgggatcaggcgtccgcgctggccagagtgctgctcgctcatgtgcagacccttactgcggtgaggcctgcgtgagcctgtgctgtgcctggtgtcaggggacaggctccgagtcagtcacagtgtgcagtcctgctgtggggacagagtgcagccattgttgggttagtacagtggcggggatgtgcctgccggcgtgatgatcaggcaggtcttgacacagcacagacctgagctgtgggactggccaggagagccaggctgcagctcaggtgtagggcgtcttgcagtgaattgcacttggagatcttccacctcttgtggaggggagacggcaggcggagccggggctaggcattcctgagacaggtggaggtgacagctttgcttgggacagaactgccagacaggattgcccatgtatctgccagccctggccccagcaggagccagttggatgactcatggcttccacctgcagttcacttcactgaagaaggctgccggcccaggccacgtggtaaatcccatgaggttctctctgcctgtgtgccccactgcaggggagggaggcagtgagtttgccatctgctgtgtgacattgtgagggtgcgcagagcagctgggggtagccctgatgcagttactgcattagatggacactgtgaagacgtgcagctatgtcatgggctcagcaagaagggcccctggcgtcacacagggcacccagccgcatcctgggcctagggtcaggggctcctacagctggaacctgcaccttctggggcacaaggtgccttctttgtggccaccacaccccatgtccagcccaggcctggacaatgatgagatgtgctcaggtgcttggtcagggctggctttggtggttggagaatcgtatcttcctagtgagttacaccattgctgggcctgctctgggctgccctcccagcatctgccttcatgatgaggcgtgacatgtgggctgtaacttgttgcccagcctcatggagaaactgtctttctgtaggttggttcctgtataccttgggccagagagcaaacataggtggcctgagagagccctggtacgtggtggagaaggacagcgtcaagggtgacgtgtttgtggtgagtgggccggcctctgagacagcactggggctggttctggcagggccagcagtgcttccagaccagggcttgagaaggcctccagcagccgtggcttcctggaggctgtgactaactctgttcctgtccttggtcccctgcctttcctgggactggccatggtggcaggagagttttaaggtattcattaggctgagttgtatgctggtctcttaatcatccctgaaccccgatacacagatacagtttctccaattttatgaaagaggacagcgacgcccagagcttgggtggctcatccggtggagagggcatggcctcagtgccaaggatggtgcccaccatggtaggatccagtgagttgttgtcaggcaggtgcagatggccaagccaggatcaaaccaagccttccaccacagtggggaccttaccactgtgaccctggcctcaaagcagggccgctcagtggcggcaagctcaccccaccttcaggggaccttgccagtgtctagaggcatttttggttgtcacagcttgggtggaaaagcaaggacgcgggtgctgctgcatctgtgggtcaggccggggatgctgcttgccgtgttcagcacagcctcttccctgagtgacccggcctccaccttggcgcgtggagctgagaaggcccactctcagcaccctggctgccggctcatgttctggcacgaatgctggggcgccttctcttagacggaggcgggggccagcaggccccacccaccgattccaggacatctccttactaggaagacctgtggggagaaaagcctggctgcgaatgaattaaatgatctagatttcagtttgctgtgagaagaccagaagggttaaccaacggcctcctgtccctggacgggtcttggtgcctgcttagaacccaaagcccttaacttcatgctcctcgtcctgcttcaggggcggggcttggcacaatcccaggaggtgccaggtctcaatggcccgaggccatgggtgggtgacagggagcaggggcctcagaaccaacctagggtatctggggccccccagaccagggccagtcctggggcacctgtgggaagccagcagctaccagtccctcctttctcctcagccatttggtgtgtggaggaattcctggggtggccttgagagaagagcccgtggtgtggctggcccctgtccctgcgaatagaaaaaccagtcctcgaggggggccgtgctgctgccccacaggtggttgcaggtagagggcctgagtcagacttgaacctgcagcattcactgtcatgggctcggatctcacccctgcctcttgcccactctgacatggtacttccttcctgggccttagtctcctcatctgtaaaatggggattcaaaggcccggcgggtgatgagatgaatttctgtgggtagaacacttcgagcggtgccagcaccgttacctgtgtgtgtgtgtgctggtaggacagttgttcccagggaccacactgaggccggccttggggccaggtgcccctcggcgtccccaccttcacattccattctgcaggccccccggacagaccacccagccctgtacagggacctgctgaggaccagccgcgtgcactggattgcggaggagcctcccgcagcactggtccgggacaagatgatggagtgccacttccgattccgccaccagatggcactaggtgactgacgggagggctcctgaggacgggccccttgaagctgagcttcctgaggccagatttgggccagggatgggagaccctggggtaggaaagtcccgttgtggagatcatttggagattacctaaagtatttagaactcccgtgtcctgtgcctgccctgagcgaggcctgggggtgctgggagcagatgcaggcaggccccggcgtgttgggctgaagcaagtgtgtacactgccccgcagtgtcctgctgcgtccagggcccaggctggtgccctgcccttcccctctaagcaggggtttttgaccccgtgggctggtgctcctttctccctgggggcctgaggtcgaccaggaaaggcctgtgccccctccaagggcccctctcttctacccagtgccctgtgtgctgaccctcaatcaagatggcaccgtgtgggtgacagctgtgcaggctgtgcgtgcccttgccacaggacaggtgcgtggggtgtgggggtgagcccggggaggactgtactgctctgcaccctgccagggcacccgggttacagaggaaggggctgaggcccaggagtagggtgtgctcgggtcacacagctggtgagggcagagtgccaccagccctgccctgggggctcctcccacagtgacaactgtgagaggatttccactctggtgtcaccaaccagccagttcctgctcgggccctgagaggctcagctgctgcccgggccccagaagcgaggacagaaaatggaaggggcatgaggacagtgctcaaagaggcagagggtcggggcccctgtgggccgagtgtgcaggagctcccagggtgggcgcctggtgggtgtaggcctgaggaatctccaggggcaggtggtgggagggaacctggggtgagggaagcggaagcatcctctggctgccaccatgctccttcctgtcacagctccacattcccaaggggtgcagagacctgccagtcccttggagtcccaggagaggcccctgtgactgtcccactcagggagaggtaccctgaagaccctccctagtgaagccactgggtgccccaggcctctcctctcctgttcagcagcagcagcagcagcaaaaccctgctcccctgggagctcagtgcctggtgctccgagcacaggccaggccccataggggagcactctgcccctgcctgccctcggctggctccctgtggcacccctgatgccagggtctctcccctacagtttgctgtgttctacaagggggacgagtgcctgggcagcgggaagatcctgcggctggggccgtctgcctacacgctccagaagggccagcgcagagctgggatggccactgagagccccagtgacagcccagaagatggtccaggcctgagtcccttgctctgacagagatggatctgctagaaggaacctggagagcaggacccatggctgggcggctggtgagcagtccaggtgcccaagggccagcttgctgctgcccaaagcagaggaagccgggctggctgagggtccgaaaagcctgcaggggcccggcgagccccaggaagagcctcagctccaggctggggctctggctgctggagcatctgctggctggtggggtggcccgagttccccttcaccgcccccagggagggtttcccacctcagagtacaccgaggggacctgcagagggggctgtcgggacagcgtggaataaacattatttcaaggacacata

SEQ ID NO: 1193 - DNA, 7035 bp, Homo sapiens; identical to SEQ ID NO: 1192

SEQ ID NO: 1194 - DNA, 875 bp, Homo sapiens
atctgacctgggtccctcgggtggcagagctggatttcagtgcacttccgctcactccccagcccctgctgcttctgctgggtcaggccccagctgagttctttcctcagcgttgctgagcccatcctgaaggctgcagtgatggggcagggccgtgcttggtcaagggagccctgagtgtgccaacagtcgtctgccgccctctgttccctcctcgccttccttccttatgccacagggtgatcaggtaactgtactgacttgagcccagagaagagcagcccactcccgtaagacagccccccatttcaggaagacatgggtttgaatgcagataagacagccccccatttcaggaagacatgggttggaatgcagagtcctgccacttgggaactccagggtggaattcaccaagtaattgtgcatttacggggcctgaggagatggagggttaatttccatgttgaatagatgcgcctgcttacctcctagaacattacctcctagaacactgtgtgccctgcagagccatcgacctttattataggccacgtgccctcggaaacttgggacagtactgatgcgttctgttgagtgcgtttggcatgtgggaattgtgatggtgcacagtgtcttggccttcactgggttttgtaggcacactaaggtttccatttcattcttcttcagttgccctggcccagcctgggtctctgggtagagcacctgcaggggcagtggacggcctgggctcagggtcggtcagcacctgagaccagcgctcctaggcctggcctgtgactgggctgattttcccccacacagcgtgctaccaccggcctggcagagccagcacggcagccggcgtgtca

SEQ ID NO: 1195 - DNA, 875 bp, Homo sapiens; identical to SEQ ID NO: 1194

SEQ ID NO: 1196 - DNA, 326 bp, Homo sapiens
gggattacaggcgtgagccaccgtgcccagctgcagacttcttttaatcattgtactagagtaactgacactatggtttactatcttattttgtctgcccagcatctcttcctgctgggattaacattctttaaatcactcgttaccccattccaataatgtggctctttatttaaagactaccaaagtcttacatgaccctaccctggacagttgattggtccaggggtaggcacctgacctaaacacagtcagtcagttatttcacagaatttataaaattggaagtaggaaaagagactacttctcagatggagatcttcaag

SEQ ID NO: 1197 - DNA, 155 bp, Homo sapiens
ccatttctcagaactgaataaacgtattgccaagaggcttttcttaggaatgaaacgtatctgggtaaatgtaaacaaaattgtctctgtcttgacagtaccaaagttcacataaaaggtgaaagctcctggatcaatgccatggctccatggaa

SEQ ID NO: 1198 - DNA, 263 bp, Homo sapiens
tttctcatttttccaactagaaagcttgcctaagatctataatggtatctcttctgcaactatcaggagaagaaaattgtagacatagtggcctgatatgtagccctgaaccaagtatagcagccatctacatctagtcttctagttacaagaaccaaatacattcctatatctaatttactgctataagggtatcttagttgtaggtaaagatgtccctaattaatacattaccattagatcctttttgaaattactatttt

SEQ ID NO: 1199 - DNA, 263 bp, Homo sapiens; identical to SEQ ID NO: 1198

SEQ ID NO: 1200 - DNA, 384 bp, Homo sapiens
gtccaggtcagttgtcttgaaaaaatgttctacattctggattagttggactgattcgccatgattcctagatcaaatgtttccagtaagaacaccacataaggtaatgttacgtctctcccgtgcaccacattatgcatgtggctgtcccactattagcaataccaagctcggccattttgtaatttttccctttgtaataaataagtcatctgtaaggtgatattttgagactcaagggtattatcaatgacaattatggaagccagaagacaggaggataccaccttcaaagtgctaagaaaaaaataactattacagcagacctatattgccaatgaaaatattactgaagaatgaactcaagataaaatatatccttaa

SEQ ID NO: 1201 - DNA, 450 bp, Homo sapiens
aaatgaaagttctctaaaatgaatgaattttgctttatgaacagcacactttttattttctcattttgctacatgtatccatattttgttaggactggttaacagtccagggacaagtgtttggaaattactaagtctagctatgaaaaagggaaaaggcattttatttcaccattatgaagaactcgggcttcttttttaaccacagtaattaggattataaaatccatttcatagttaacgaatctgaagtatgaattgttaaagaagcatgcacagcatcacagagatagtaagtggctcagatttcaaccaagtctaaacctaaagcgtacgttctttctactccgccatagtgagaagcccaaccacacaagtatgaaatacctaaaggagttaaaggctgtcaaatggcagtttaaaatatcatttgtgactgaatcttcagga

SEQ ID NO: 1202 - DNA, 646 bp, Homo sapiens
tcagtttcatcatccacaaactagaagacagtggctacctgagaaactgttaatggagacaaatttcctagtacataacaggccaggtctcttttcacttttgtaactgccatgcatatagactacatctattccttgatatgaaaccaacaaatcaagttactttaaacactgcaccctttatacaggttgagtatctcttatctgaaatgcttgggaccagaagtgtttcagattttagaatatttgtataaacatgatcaggtatcttggggatgggacccaaatctaaacatgaaattcattcacgtttcccacacatcttattcacatagactgaaggtaattttatacaatattttaaataattttgtgcatgaaacaaagttttaactgtgatccatcacgtgaagtcaggtgtgaaattttccacttgtaacattaatgtcaacactaacggagtttcagaatttggagcatttggatttttgattttgggatcaggagtgctcaacctgaataaggaaagacaatgtagagaggtggtattataaacaagctagagttcagtcaagtttcagcaccacaaattatttttgtttatcaatccctatcacccttaaaacagaaagttataaggaactat

SEQ ID NO: 1203 - DNA, 144 bp, Homo sapiens
aattagccgggcatggtggcacatgcctgtaatctcagctactcaggaggctgaggcaggagaatctcttgaacccaggaggcggaagttgcagtgagccgagatctcgccattgcactccagcctgggcaacaagagcgaaac

SEQ ID NO: 1204 - DNA, 611 bp, Homo sapiens
gcacttgttgcccaggctggcgtgcagtggcgcgatctcggctcactgcaacctccacctcccagtttctcctgcctcagcctcccaagtagctggagttacaggtgcccaccaccatgcccagctaattttttttttttttgtatttttagtagagacagggtttcaccatgttggccagacttggtctcgaactcccaacctcaggtgatccacctgcctcaacctcccaaagtgctgggattacaggtatgagccaccgcacccagactctaagataaatttctaaagcacaattgcttggcccacattcagtctgaggaatggcaatccaacattctcaatccaagagagtctgaccagccattgggcacaagttcaaatcctccaggagtactggatgttttagattaggacatcagaaaggacaaagaaatgatctgttctcagaaggaatcaagatacccctgtaggacaccccaacatccccacccacaaaagctggtgattatacgaagccctaagacagtccagatttcatttctattgcccaggccagtagactcctgatccagtctatcattaccactctccaggatcagaagttaatc

SEQ ID NO: 1205 - DNA, 359 bp, Homo sapiens
gcacaaataggataatatcctgtgttcatacattagaagatttttatattatcaaaatgtcaacactacccgatgtgatgaacaaattcagtgcaatccctatcacaatctcagtgacttttttttacagaaatataacaaataattccttctatttaccttatttttagagatagggccctcttctgtcattcaggctgtagtgcagttgtccaagaatagctcactgcagcctcaaactcctggactcaagtgatcctcccacctcagccttccaagtagtctttagagtagctggattacaggtacatgacaccacactcggctaactcttttatttttaaaagttgtattagaga

SEQ ID NO: 1206 - DNA, 1521 bp, Homo sapiens
tgtatcctttcttggaagtggagtctttaattatctccagcacataggaagtgacctgagtgctgaataaaaataagcaatggaatcgctacattaaagatgcttacaaacttttattatcaataaaatctataaattttacacctatcaactcagaaaaattcactgggaggagaaaaactattaaaaagcctaacttcaaatgaactcaaactttcctgccaaatcataaatatgaaaagtaaatcatccatgtatgctagaggatctctctgggagaagtgtcctacaatttataacattttacaagtggttaaatccattaaaacttcaaaaacttttagattgtctttctcctgtaatgtgatatcttccctaacttgctaaaactgagaacccagctagctttacataactgaaatgattgaatttgtttgcctaatacactaatatttgattttaatgaattatctcactcccacaaagtgtcttatgttagctgccttcatacgtggccttttaatcatccacatctaagaatactgagatgcaaaaattgctcagagtccagatgataataaggctaagtttatttctaggcacaagcatttagaacaaactgcctgcaagggacaaatttaccgccatgggccttttactttcacttggtcttacagctgcagaatccatccctaatttttgtcaactgcccattggccttttagaggttcttagtaagaaaatcaatggctgaactaactactgcgaaaactgaaagcacattatcttctcatggtaattaagtcatttaattaatattaggaaataaaggaataagcactaataaatggccatttagattctgggttttgcgtggtgacttagatgtcttcagtttcatggttaagagtgtaaggactttggaatcagtttctaattttaaaattaaatttcatcatttgctatctatgtgaccctggaggcaagttatgcccctttcctttgcctacatttctccatctgtaaaatacaggttatactgtaaataatcatggtgatgttctgaagagaaaagctatcataagcacttagcaaagtgtttggcacattctaattatgcaacaaaagctatcatcatgtccacagcttcaagttacctcttgtaactaacacttcctaaattcctatggctaaattacaaatttctactcaagtgaattaagtcctgtgattagacacctactttccctgaaggttttaaaattatcttcagattctggctttcatttgtcttcccaatggctttctgttcccttaaatttgtcctccatctctgcccccaattactcagctctttcctacagaggattttaagtagctttactgggggtatggtagaaagagaaaggggacttgaaggaatctttaaggcatcaaaaatagtctaagttggcctcaaatatgaactgagtagtctgggctcaatctgttactggaattcagctttctttagtaggaagc

SEQ ID NO: 1207 - DNA, 3615 bp, Homo sapiens
cctattttgtacccttgaaatttattagtttattctgaggatacaaataacatttatatatgcacacatgagccatcttaatatttccatttagttcagaatttcaaaaatatcaatcgatccttgaactttcaagtatagaaatgagtttagggtaaaatagtaacctttgaaataattacagtactgtattagatttgtctttttctttaattgcttaacttcatgaactcatttgtttttttctttttaatttttattcatctactttttccaatccccaatgtgattaaattcagaagaacagtatctttcaagtaaatgatgcaaaacttcctttcacatcatctcacgtcctttccccctttgtattagtagataattatactatctacagccagaacgatcttcctagacgtgatcatgctatgtgctatgaaaaaaaccttcaatggggacctccactaccgaaatgatgtggtagtactggcagtcgctcccaggtgcagtaactaggaaaaaatggatcaaatgcaaaatacattacagatacgaaagagctgtggaagcgcttaagactagatgtactaaaagtctttgtcttttctacatagctgagactaccaactgttttctttcctggcatcatttgccaattctaggcatggattaaagatcaggctttgtgtggactaaagcactttactggggaaaatcagcaggacttttactgactgcatgatctatcatgatgtactagaatctagaggagccctaaacccaatactgagtgagactagaacttaggggctaggcaaacaagttttcttaacaggccaataccacctctcaatgccaggcttcttcatatcctattctttctcccatttcctctcttgtatttggccacttctatccttttttcccccctcaggactctgctatttatccttcacgaaatccatccataaaatctaccaaatacgcaccacagaagctttctacaggcttatctttggcataatttttatttaacaacctcttattttccttgttgtatcctttcttggaagtggagtctttaattatctccagcacataggaagtgacctgagtgctgaataaaaaataagcaatggaatcgctacattaaagatgcttacaaacttttattatcaataaaatctataaattttacacctatcaactcagaaaaattcactgggaggagaaaaactattaaaaagcctaacttcaaatgaactcaaactttcctgccaaatcataaatatgaaaagtaaatcatccatgtatgctagaggatctctctgggagaagtgtcctacaatttataacattttacaagtggttaaatccattaaaacttcaaaaacttttagattgtctttctcctgtaatgtgatatcttccctaacttgctaaaactgagaacccagctagctttacataactgaaatgattgaatttgtttgcctaatacactaatatttgattttaatgaattatctcactcccacaaagtgtcttatgttagctgccttcatacgtggccttttaatcatccacatctaagaatactgagatgcaaaaattgctcagagtccagatgataataaggctaagtttatttctaggcacaagcatttagaacaaactgcctgcaagggacaaatttaccgccatgggccttttactttcacttggtcttacagctgcagaatccatccctaatttttgtcaactgcccattggccttttagaggttcttagtaagaaaatcaatggctgaactaactactgcgaaaactgaaagcacattatcttctcatggtaattaagtcatttaattaatattaggaaataaaggaataagcactaataaatggccatttagattctgggttttgcgtggtgacttagatgtcttcagtttcatggttaagagtgtaaggactttggaatcagtttctaattttaaaattaaatttcatcatttgctatctatgtgaccctggaggcaagttatgcccctttcctttgcctacatttctccatctgtaaaatacaggttatactgtaaataatcatggtgatgttctgaagagaaaagctatcataagcacttagcaaagtgtttggcacattctaattatgcaacaaaagctatcatcatgtccacagcttcaagttacctcttgtaactaacacttcctaaattcctatggctaaattacaaatttctactcaagtgaattaagtcctgtgattagacacctactttccctgaaggttttaaaattatcttcagattctggctttcatttgtcttcccaatggctttctgttcccttaaatttgtcctccatctctgcccccaattactcagctctttcctacagaggattttaagtagctttactgggggtatggtagaaagagaaaggggacttgaaggaatctttaaggcatcaaaaatagtctaagttggcctcaaatatgaactgagtagtctgggctcaatctgttactggaattcagctttctttagtaggaagcctttgaaggttttacataaaattataatgatcccatttattactatcagcctaaagaaccatttaaaatttgtgaattttcttgacacaatttccacatttttctgtaccttaagaatgtatcatgcctagttttatcaatcatgttttatcactgatactaacagaatcaagggtctgtggtacatttattttgcttttgcccatccagccttccttgcccattctggaaaaagaatgttttcaataaggggacccattacagatggtttgggtggcacactgagtatttagcaggtgagcctaaatactcctttattggatttacttattcccatgcttgtgtactgctacttacatcacaatcaaaagcagggattaccagttttttgaattaaaacaagatgccctcaaagttcagagtgctatgaatgttgcaacctcaaagttagctagtgaatttacattactgcctattacgactctaaatcctgagagccagaaaaggcctatgagcctcagatcttacaaatagcctggagtacttcttgaggatttgtaaacattccttggactcagcagtcccttgagaaaatcatttcctccaaaatctgtgtctatattctctatcttgtttaagctctccctccattcccaaacctaggaatcatcctaaattttcatctagaccctaattcaagatcctcagtctctcttctcttcctactgcttctgctgtatttcatgccctcatcctaactggtctgtctctacaccaactctaattgttcccttctatcaaagctaaacttgatgctgttttactggatgttttatctaacacagaggtaagaattattatttacgagctacatatcactatcaaaatggcaatgaaaacttttgtgctttttgcagtaaggattctgaaacttcaatttggaggctgttaagaaaaactagagaccctaagagtcatcaaatcacaagtgatgaattggctattatatccaaaaccatccaggcaaaattactacat

SEQ ID NO: 1208 - DNA, 4507 bp, Homo sapiens
aatcaatatctgattgttagcaacagaacaagtgattgtgtggcatgcactataatcaattcaggatatttaatatagaatatgtgttatcacatgttaaatagggcatatgtttgaactttttaaaaaaacttttcccctaagcatttgagatcagctgaattaagctgctaatcattattcccctttgatctcattccttggtccaagtcctgagagagatactgttcctcttaaggatacttacgaaataatgacatggaaatattttgcttgtcacagtatattgcctgttttaagacctacttttaaaatcaaataagccataaattcttattgtaatgccatacttttaatcatttaaactaaatgtttaatcagaagttgtctaatataaaaactagtaaaaaagcacgtgaaatgtatatactttaaccaagaaattctaaaaattggtttctatagagaaaactggacagaatgacaatgtatgtgacacaaaggtgtttaccacagcattttttatcacagtaaaaaatagtaaaaaaaaaaaatcacaagctaaatatcaatggagaattgattatagtataatataaaaatgatcatacaatgatcatatatacatttttcacttatatagtaagttgtccatgacttactggttaaaaaaagtgataaaactaaatatatgaatatcaaacaaaatacaaatagtgcttgcatttcggtggtagacttttatgtgacttgtactctgtactgaattgctaaaattttttacatcatattcccttttataagggttaaaataatataataactactgttttcattttgaacagacaaaagtacagagttctgggatacaatacagttcacaaatagtaatcctattttgtacccttgaaatttattagtttattctgaggatacaaataacatttatatatgcacacatgagccatcttaatatttccatttagttcagaatttcaaaaatatcaatcgatccttgaactttcaagtatagaaatgagtttagggtaaaatagtaacctttgaaataattacagtactgtattagatttgtctttttctttaattgcttaacttcatgaactcatttgtttttttctttttaatttttattcatctactttttccaatccccaatgtgattaaattcagaagaacagtatctttcaagtaaatgatgcaaaacttcctttcacatcatctcacgtcctttccccctttgtattagtagataattatactatctacagccagaacgatcttcctagacgtgatcatgctatgtgctatgaaaaaaaccttcaatggggacctccactaccgaaatgatgtggtagtactggcagtcgctcccaggtgcagtaactaggaaaaaatggatcaaatgcaaaatacattacagatacgaaagagctgtggaagcgcttaagactagatgtactaaaagtctttgtcttttctacatagctgagactaccaactgttttctttcctggcatcatttgccaattctaggcatggattaaagatcaggctttgtgtggactaaagcactttactggggaaaatcagcaggacttttactgactgcatgatctatcatgatgtactagaatctagaggagccctaaacccaatactgagtgagactagaacttaggggctaggcaaacaagttttcttaacaggccaataccacctctcaatgccaggcttcttcatatcctattctttctcccatttcctctcttgtatttggccacttctatccttttttcccccctcaggactctgctatttatccttcacgaaatccatccataaaatctaccaaatacgcaccacagaagctttctacaggcttatctttggcataatttttatttaacaacctcttattttccttgttgtatcctttcttggaagtggagtctttaattatctccagcacataggaagtgacctgagtgctgaataaaaaataagcaatggaatcgctacattaaagatgcttacaaacttttattatcaataaaatctataaattttacacctatcaactcagaaaaattcactgggaggagaaaaactattaaaaagcctaacttcaaatgaactcaaactttcctgccaaatcataaatatgaaaagtaaatcatccatgtatgctagaggatctctctgggagaagtgtcctacaatttataacattttacaagtggttaaatccattaaaacttcaaaaacttttagattgtctttctcctgtaatgtgatatcttccctaacttgctaaaactgagaacccagctagctttacataactgaaatgattgaatttgtttgcctaatacactaatatttgattttaatgaattatctcactcccacaaagtgtcttatgttagctgccttcatacgtggccttttaatcatccacatctaagaatactgagatgcaaaaattgctcagagtccagatgataataaggctaagtttatttctaggcacaagcatttagaacaaactgcctgcaagggacaaatttaccgccatgggccttttactttcacttggtcttacagctgcagaatccatccctaatttttgtcaactgcccattggccttttagaggttcttagtaagaaaatcaatggctgaactaactactgcgaaaactgaaagcacattatcttctcatggtaattaagtcatttaattaatattaggaaataaaggaataagcactaataaatggccatttagattctgggttttgcgtggtgacttagatgtcttcagtttcatggttaagagtgtaaggactttggaatcagtttctaattttaaaattaaatttcatcatttgctatctatgtgaccctggaggcaagttatgcccctttcctttgcctacatttctccatctgtaaaatacaggttatactgtaaataatcatggtgatgttctgaagagaaaagctatcataagcacttagcaaagtgtttggcacattctaattatgcaacaaaagctatcatcatgtccacagcttcaagttacctcttgtaactaacacttcctaaattcctatggctaaattacaaatttctactcaagtgaattaagtcctgtgattagacacctactttccctgaaggttttaaaattatcttcagattctggctttcatttgtcttcccaatggctttctgttcccttaaatttgtcctccatctctgcccccaattactcagctctttcctacagaggattttaagtagctttactgggggtatggtagaaagagaaaggggacttgaaggaatctttaaggcatcaaaaatagtctaagttggcctcaaatatgaactgagtagtctgggctcaatctgttactggaattcagctttctttagtaggaagcctttgaaggttttacataaaattataatgatcccatttattactatcagcctaaagaaccatttaaaatttgtgaattttcttgacacaatttccacatttttctgtaccttaagaatgtatcatgcctagttttatcaatcatgttttatcactgatactaacagaatcaagggtctgtggtacatttattttgcttttgcccatccagccttccttgcccattctggaaaaagaatgttttcaataaggggacccattacagatggtttgggtggcacactgagtatttagcaggtgagcctaaatactcctttattggatttacttattcccatgcttgtgtactgctacttacatcacaatcaaaagcagggattaccagttttttgaattaaaacaagatgccctcaaagttcagagtgctatgaatgttgcaacctcaaagttagctagtgaatttacattactgcctattacgactctaaatcctgagagccagaaaaggcctatgagcctcagatcttacaaatagcctggagtacttcttgaggatttgtaaacattccttggactcagcagtcccttgagaaaatcatttcctccaaaatctgtgtctatattctctatcttgtttaagctctccctccattcccaaacctaggaatcatcctaaattttcatctagaccctaattcaagatcctcagtctctcttctcttcctactgcttctgctgtatttcatgccctcatcctaactggtctgtctctacaccaactctaattgttcccttctatcaaagctaaacttgatgctgttttactggatgttttatctaacacagaggtaagaattattatttacgagctacatatcactatcaaaatggcaatgaaaacttttgtgctttttgcagtaaggattctgaaacttcaatttggaggctgttaagaaaaactagagaccctaagagtcatcaaatcacaagtgatgaattggctattatatccaaaaccatccaggcaaaattactacat

SEQ ID NO: 1209 - DNA, 298 bp, Homo sapiens
tcaagcctgtaatcccagcactttgggaggccgaggcgggcggatcacgaggtcacggagattgagaccattccgggttaaacggtgaaaccccgtttttaattaaaaaaaaaaatacaaaaaattagccgggcgtagtggcgggcgcctgtagtcccagctacttgggaagctgaggcaggagaatggcgtgaacccgggaggcggagcttgcagtgagccgagattccgccactgcactccagcctgggcgacagagcgagactccgtttcaaaaaaaaaaaaataaataaataaa

SEQ ID NO: 1210 - DNA, 1688 bp, Homo sapiens
aatcaatatctgattgttagcaacagaacaagtgattgtgtggcatgcactataatcattcaggatatttaatatagaatatgtgttatcacatgttaaatagggcatatgtttgaactttttaaaaaaacttttcccctaagcatttgagatcagctgaattaagctgctaatcattattcccctttgatctcattccttggtccaagtcctgagagagatactgttcctcttaaggatacttacgaaataatgacatggaaatattttgcttgtcacagtatattgcctgttttaagacctacttttaaaatcaaataagccataaattcttattgtaatgccatacttttaatcatttaaactaaatgtttaatcagaagttgtctaatataaaaactagtaaaaaagcacgtgaaatgtatatactttaaccaagaaattctaaaaattggtttctatagagaaaactggacagaatgacaatgtatgtgacacaaaggtgtttaccacagcattttttatcacagtaaaaaatagtaaaaaaaaaaaatcacaagctaaatatcaagggagaatggattatagtataatataaaaatgatcatacaatgatcatatatacatttttcacttatatagtaagttgtccatgacttactggttaaaaaaagtgataaaactaaatatatgaatatcaaacaaaatacaaatagtgcttgcatttcggtggtagacttttatgtgacttgtactctgtactgaatggctaaaattttttacatcatattcccttttataagggttaaaataatataataactactgttttcattttgaacagacaaaagtacagagttctgggatacaatacagttcacaaatagtaatcctattttgtacccttgaaatttattagtttattctgaggatacaaataacatttatatatgcacacatgagccatcttaatatttccatttagttcagaatttcaaaaatatcaatcgatccttgaactttcaagtatagaaatgagtttagggtaaaatagtaacctttgaaataattacagtactgtattagatttgtctttttctttaattgcttaacttcatgaactcatttgtttttttctttttaatttttattcatctactttttccaatccccaatgtgattaaattcagaagaacagtatctttcaagtaaatgatgcaaaacttcctttcacatcatctcacgtcctttccccctttgtattagtagataattatactatctacagccagaacgatcttcctagacgtgatcatgctatgtgctatgaaaaaaaccttcaatggggacctccactaccgaaatgatgtggtagtactggcagtcgctcccaggtgcagtaactaggaaaaaatggatcaaatgcaaaatacattacagatacgaaagagctgtggaagcgcttaagactagatgtactaaaagtctttgtcttttctacatagctgagactaccaactgttttctttcctggcatcatttgccaattctaggcatggattaaagatcaggctttgtgtggactaaagcactttactggggaaaatcagcaggacttttactgactgcatgatctatcatgatgtactagaatctagaggagccctaaacccaatactgagtgagac

SEQ ID NO: 1211 - DNA, 1045 bp, Homo sapiens
ttccacttctagttatttattcaagagaaggaaaaacaatgatcacagcaatacttgtatgcatgttcattgcaacttaaaagcgtaaaaaccccaaatgtccatccacagacgaatgtataaactgtggtatccattacacaatagactacttactactcagcaataaaaatgaagtaactttcaataaatgcaatattattggcagacattgttgaaggaaaaaagccagacaaacaactacataaaatatgtttctatttagatgaagtggcaaactaatctgtagtgttaaaaattagattagtgattgcctgggccaagtggcaggttggggaggatggctgcaaagaagtatgaggaaactttctccaatagatgagaattttccgtatcttgatctgagtggcaaattgtaaacttaaaatatatataaaatttattgtatgaaaattaagcctcaataaacgtgattataaaaaacaagtctgcaaggaaaccagaatcatataccttctcttgtgaaatcaccatgaagtgtgaatggtcaggaaaaagccagtaatattcatacatttaataatttcagctctactgaataaacatataagtctgatgggtgatgaaaatagctactacaatcttcatattctaactcctataaagactgtatatcagaatctgcaaacttttatgcagatcccagtgactcaattacatgttcaactatgattaaagcttcaataaacttggttgttcatctacttcaccaaaacgagttaagaattaaaaattagaagagccttcataggcaagtacaataactaaaataagaaatgacagctcaaagcttaactacaaggaaaaactacccattacccttgctcccaggccaacaatacagtttaacttaaaacagtgggggcatttagtttaggggcattttctatacatctcagtattactagagggtatttcactgatcccccacaataaaataagttgcaagtatagcaatgactctgtcatcaaggtaacttttaaa

SEQ ID NO: 1212 - DNA, 263 bp, Homo sapiens
acttagcctggcatgatggtgcatgcctgtagtcccagctaactgggaggctgaggttggaggatcacttgagcccaggagttcaaagctgcagtgagctgttatctcagcactgcattccaccctgggcaacagagtgagactctgtctcaaaagagaaaacaaaacaaagcaaaacaaaggatatgaatagataatcctccaaggaagatatacgaatggcaaataagcacacgaagtgacgctcactatcattagctatc

SEQ ID NO: 1213 - DNA, 442 bp, Homo sapiens
gttattacaccttttctaacccagccttgaaaatcatgctgtgtattacagggagtcactaagtctggtctatattaaaggggactggaattagcctcctacttttgctggaggcaagttagactcctactttacgtagggaagcaagttaaagaatttgtggatatgttttaaagccccacagcagtgatacttgagcaaaggaggtgaggacatccagggaaaaatattccaggtacatggtacagatacataaagaccctgaaggatgatggatgcctgatagtttagatttgcttatagattagttaccactgcacagcatcacctccttgagagcagggtgaacagtgttgggagaacagtgttgaaagatagttgcagttcaacaattttttttgtgaaaggcaccatgtattaaaaattctaaaaatgcgtacat

SEQ ID NO: 1214 - DNA, 383 bp, Homo sapiens
tggcatgtgagtgcatctattcacttggcactcatttgtttggcagtgactgtaagccagatctgatgcatacaccagcttgtaaattgaataaatgtctctaatactatgtgctcacaatagggtaggggtgaggagaaggggagagaatcacaactgcataataataatgtaagactgcaaatgcactgagagagagagatgtgcggggaatcagggaatcataggagcccaggggaggtgctctttacccagcccaaaaccatagggagtgtcaggtggcccttccagaaaagaagactcctgttcttctttttatcagttcttccttttatcatacattaaagtggttagagcttggtgcgaatgtttaaaaaaaaaaa

SEQ ID NO: 1215 - DNA, 301 bp, Homo sapiens
agagacctttcacctgtctagtcagctgtattcctaggtattctattcttttttgtggcaattgttatcttattttataaagttgccacaggcacaccaccctgatcagcagcaatcaacatttaggcaagaacttctaccagcaaatagattatgatttgctgaaggatctgatgatcgttggtattttttagaaataaagcattttaaaattaaaatatgtactttttttagacataatgttcttgcacacaataggctatagtatcgtgtaagctaaagggttttttttttttttttt

SEQ ID NO: 1216 - DNA, 301 bp, Homo sapiens
agagacctttcacctgtctagtcagctgtattcctaggtattctattcttttttgtggcaattgttatcttattttataaagttgccacaggcacaccaccctgatcagcagcaatcaacatttaggcaagaacttctaccagcaaatagattatgatttgctgaaggatctgatgatcgttggtattttttagaaataaagcattttaaaattaaaatatgtactttttttagacataatgttcttgcacacaataggctatagtatcgtgtaagcttaatggttttttttttttttttt

SEQ ID NO: 1217 - DNA, 88 bp, Homo sapiens
ggctggagtgcagtggcgcaatctcggctcactgcaacctccacctcccagcttcaagggattctcctgcctcagcctcccaagtagc

SEQ ID NO: 1218 - DNA, 88 bp, Homo sapiens; identical to SEQ ID NO: 1217

SEQ ID NO: 1219 - DNA, 369 bp, Homo sapiens
ggtgaggacacaccaggggccacactcgcagaaccggaaaggacgccagcaccgtgcgtgaaaaaaaagccaagaaagtccaggtgacaagttcctatgctggaacccggccctgcatctacattctcctcttcgctgatagccaggatgcttctctctcctcttgattgatgttttagtctgagctgtcattagttaaattaattttctctccaagatagtggaataaggtccacaaaggcaaatcttatgaggctgtaaaaatagaccatcatttggaggaaattcagatgtgttccctgctcttgtcgttgctgcagaagaacactttaatttgatatgaattcctcaagagaaactttaaattaa

SEQ ID NO: 1220 - DNA, 213 bp, Homo sapiens
gctttaaaattgactttctttttttctcctctctccatccttcgtcttcttttacttcacaactgtttatcaaaacccaaatatgtgcgaggctctaggctaagtcttagagaaataaattacggggaaaaatggaagagaaaagatgtacagtatgagtccccatccaggaggaatttatttttttgtggaaaaggtagatttaaaaaagaa

SEQ ID NO: 1221 - DNA, 120 bp, Homo sapiens
tttttattatactttcagttctagggtacatgtgcacaatgtgcaggtttgttacatacgtaaacatgtgccatgttggtgtgctgcacccattaacttgtcatttacattaggtatatc

SEQ ID NO: 1222 - DNA, 381 bp, Homo sapiens
gcattaagtaccagttatccacaatggtaacttccttgaaaattcacccattactagctgaataatgactgaatttgtttccttttgtatatcttttttctgggatcaccttccagataaactactcatacttggttccttgtttcatggcctgcttctcaagaacccaaactattataggcattttcaaactaaatttgaagatgcaaatatcaataaaacagcaattccaatcctaggtatttaccttagaggatcaacttcttatgtgcactgggagacacctccaaaaatttcacaatattccattttgtgttagcaaataaatggaaaaatgacaaaggataaataaattattgtcttcataacactacccagcta

SEQ ID NO: 1223 - DNA, 381 bp, Homo sapiens; identical to SEQ ID NO: 1222

SEQ ID NO: 1224 - DNA, 380 bp, Homo sapiens
accctgcacctattattttttcactgtattagtggtatgacatatttttttaccattcagtacttacgtatgaattattataagaaaatgattgcttattagtaacatataaattcagtgtcaggaacgatggtgatgtcacacaaccacagattgtccttatgggtggctgagataatgaaacgtttagtttctgatggtttaatgcaaacaaactttgtttcatatataaaattatttaaaatgttgtataaagttatattcaggcaatgtgtaataaggcatacatgaaacataaatgaatttcatttttagagttgggttttattcttaagataactccgattgtctatacaaatattccaaaatcaaaaaataaa

SEQ ID NO: 1225 - DNA, 402 bp, Homo sapiens
ggtcaagacaaatatctgctttcactcctcctattagcatcacactggggatcttagcctgcgaactgagacaaaataaagaaagaattgacatatagagtgcatactaagaaacaaaactgcctctattttcagaggacatgacagtcaacatacaaaatgtacaaaaagttcttagatctcataagtgaacttagcaaggtctcataatgcaaagaaaatatacagaaatcaatcatattactatattacagcaattaagagtagaaatctgaagtttttaaatgacgtcagttacaatagtactaaataaaattaagtacttgggtataaatttaacacaatatgtgaagaatgtctgcactgaaacttacaaaacgctggtaaaagaaatcaaatatc

SEQ ID NO: 1226 - DNA, 402 bp, Homo sapiens
ggtcaagacaaatatctgctttcactcctcctattagcatcacattggggatcttagcctgcgaactgagacaaaataaagaaagaattgacatatagagtgcatactaagaaacaaaactgcctctattttcagaggacatgacagtcaacatacaaaatgtacaaaaagttcttagatctcataagtgaacttagcaatgtctcataatgcaaagaaaatatacagaaatcaatcgtattactatattacagcaattaagagttgaaatctgaagtttttaaatgacgtcagttacaatagtactaaataaaattaagtacttgggtataaatttaacacaatatgtgaagaatgtctgcactgaaacttacaaaacgctggtaaaagaaatcaaatatc

SEQ ID NO: 1227 - DNA, 109 bp, Homo sapiens
tccttttatatggctgcatagtattccatggtgtatatgtgccacattttctttatccagtctatcactgacgggcatttgggatggttccaagactttgctattgtga

SEQ ID NO: 1228 - DNA, 361 bp, Homo sapiens
ccagcactttggaggctgatgtgggctgatcccttgagctcacgagtttaagatcagcctgggcaacaaggtgaaaccctctgtctacaaaaatacaaaaatctgctgggtgtggcggtgcacacttgtggtcccagctactctggaggttgaggtgggaggattgcgtgagcctgggtggtgaaggttgtagtgagccaagattgcaccactgcactacagcctgagagatagagcaagactctatgcattagtccattctcaaattgctataaagaactacctgatactgggtaattcatgaagaaaagaggctttattgactcacagttccacaggcggtacaggaagcatggctggg

SEQ ID NO: 1229 - DNA, 705 bp, Homo sapiens
cccataactcatagggattacatttcagcatgagatttgggtgaggacatagagctaaaccatatcgccctatctcaaaaaataaaaataaaaaataaataaataaaaataaaaataaagagagcaagcattttgtgagcttgggttctctcttatgtaaggaaggtaatttgcagaaatatgtctgtagttatctactttaaatacaatgcaaattgataaaatacagtaaaagaaacatatatttttgaaaatatattgaaagtgttgaagggacttgatagaagtgagtttctaaaaagtatttgctattaaattgaatgagggagaatggaaactatagaatattggagaaaacattgggaaaccaaaactgaatctaatagtcaataagcatggctgtagatgcaatactagtaataatcatcgttatttgttcctattcatatcgtttacttttaaaacctataaattagggagtgactgtatgatttcagatccatctttctctttctcttcttcagcatcttactaaactttaaacccagataaatttccccagtgatttgccttataatgtttctgttctaaaccttgcgtttagaagcttccatataatttgtgcagccatatctagtaatgggccaatcaatatccccccaccctgaccctgttcctgtcataatcacaactagatccttactc

SEQ ID NO: 1230 - DNA, 741 bp, Homo sapiens
ggtaaaagcaacttgggaaagtagagacaatcagggtaggccagtctgtcaagggacttatctgggcatgaaaggagaaattgtttgaggctagaggtggggttcagtgtcaagagagggttcttcttaaataagatggaacttcactgtacctgaaaaagacctatagaaagagtaaaaggaataatagctaagccttgaataaaatggaacaagatatcatcaagagtaaaggagaggtattatccctaaactgggtgcacagctcctattctgagtctaaagcggagacaggaggaagaagggtgacatggacacatttgtaggtaagagaggggatggagtttactaaggatggaacttacagttgtcattttcactgtgaagtaaatggcttgttgatttgcttagtatataggtttggggtttggttagggcctttgagggtatagtgttttgcagggcagtccatgttgttgagtccatgtgtaatccctaccactattgtcattttgttcatgaacccagtaagcaagcactgtgcaaagcaggaggtcttgtccacataattgctggatgctttcaatattggagcaagcattccagtggttccaatggttcactcatttcctcacactctacgccctttgtaaaacatctgttgatgccttcttcttgcaagtctccttatcctcatttctctaatccttttaaaaaaatcattaaaaattgcccataaat

SEQ ID NO: 1231 - DNA, 150 bp, Homo sapiens
acacaatgaagtccaaaaaatagaattaccaggcagactatgtaacaactgtgctcactatatacaatgagatgaaagtcaagatttaaaatgttggcagggaaccagcaaccataaaatgtgatatcatagattaaaaaattaacaaaa

SEQ ID NO: 1232 - DNA, 451 bp, Homo sapiens
gcataaacaaggaaaaaaacaccaaatgaaatcctttaaaaagctccatataacataaaagtagggacccactgctacaaagtactgttaaaaaatatgcgtgaaagttcatcatggtaaaagaaggaaattaagaatgcacctgctttgagttattaaaagataaaaaggttatctgtaaaagagtatttaaaaaggaagctgataaagataaaaaaaactgccaatattaagaaaagaagtcatagaaattaaactccattgcggaatgaagatccacactggggacagttagggcagaatgttttatataatgaaggaaaaaatataagaaataagatgatagatatgggaaatagaatatgaagctatgaataattggcagccttgagaatgaaactgaatgaatagactagaaattataattaaattaataattaaagacatataa

SEQ ID NO: 1233 - DNA, 17858 bp, Homo sapiens
tttgtggagttgccattcctgcctggggctgtctattgtcggaattcttttaactgggagagaaataaactgctttgtataaagaaaaaaatgggggtattactccaataaattgaagtgatcctaaaacaaagaatacaggcctagggagaataaagcaggccaaactacgtggtgtttttttttttttccaaacaaatttaattctgttccagccccaaagaagaggaaggacctaaagttcaaaaataaaaataaaaattgctaaaaataaaagccattacaaaattaagccccctcctttagcaataaatactgaactgatatatacatatgaggcttaggaaggaggcaacaacaggaaccttggggactctgtcccatggcaagatcccaagacttctaccaattccatgctctttgcttaaaacatagagagcagtggaagagacaggagagatatgccagaagagtatgtggccctgtagagagctggaacatgatgaggacagaggagagagaagagatacgaagtgtaatacaggcagggaaagagaaagtcttcatttaaaacattcctcccatccctgctgaatcactggatgtggctggaccggctgtccagagccttgtctcctctcctccactccctgttgagcatgcaagtcaaaggtcattcacactgtggtcgcgatgccactgtggcaacagcctggctgctggatccctgaggcttcccattcaccactagcaggaggggcgtctccactcgaacactggaaaaggaatagtcctagaaaagacagacagacaaaggttcactacagattccaagatggaaaaagctccagcatggggatacaccacttgcaactttctgcaccacctcccctgttgtataccccctctacttccatctcacatcagacaaaactgagctaacacaggggacgaaaatttcccaaagttttcaatcttcagaaggaaaacatggagcatgtaaggtcatgtagtgccactacaagaatgagacagctctttgatccaaaaaaggcaggttcctggcattgcctaacaaaagaatgcaaccaactctcatagaatctgccttttcccacggtgtttcctgataattaactagatacacatagcagccggccagagccagtgggaatcctgagaaaatctcagtccaaatgtttataaggtcctaatttaatccaccaaatacaaattaaagttacttctcttttatatcaagaggaggaaatagaacatgaaacagaatgtagccgttttcctaataacaaaaaaggtatcagctcactgtatcagtttaagtgtattttaagttgtaaaacatattaaatagtcttcatccaaaaaatatggcaatgagaggcaggctcttttaagtccaagtaaagtaaatttaaaagttctcataaaccaattttttttaagtcttcacagaaatatcaacaagtgacacaaaaaatggcaatttatacaagaaatataaattaatattcatgctatattttccatgtaaaattagaaaataacttttcaaaggtttccaaccagagttgagaaaaaaactacagagaaacacttatttacatccactgttggtagtgacaactaactagtacaattttccaaagaattatttggcaatatgtatcaaaagcctcagaattctgcataccctttggacccaggagtctacattagaaattcatttaaggaactaatcatagatacaagcaaagatacaaaaatcctcactgtgtttctaattttttttctattataaaagtactaatttagatcggaggtcatcaaagtatttctgcaaagggacagatagtaaatattttaggctttgtaggtcatatggtctctgttacagaacaagtcacctctgacactatagtgcaaaaacagccacagacaatagtaagcaaatgagtgtggctgtgttccaataaagctttatttgtggacactgaaatctgaatttcctgtaattttcacatatcacaaaatattacgcttctgtccatttttttcacttaacaacacagaaaccacactcttgtttttcttttttttttgaggcagactttctctatcacccgggctggcgtgcaatgggacaataatggcttactgcagcctcaaactcctgagataaagtggttctctcacttcagcctccttagtagctgggactacaggcatgtgctaccatacctggctaagttttttaacatttttttgtagagacggggtctcactatatagcccaggctggtcttaaactcctgggctcaagtgatcctcccaccttggccttccaaagtgctgggattttacgcatgagccaccatgcccagcctagaaaccattattaataaacacaagcagtgagccagatttggtcaatgggctttgccaacctctgatctaaatggttaaacagtagttaaatatctacattcataaggtttttttaagaattgaatggggcaaggcaggtaataaaaactcttagcacagtgtctagcactcaattaagtgttaaataaatgttaactatcattaccatcttcatcaccccgtgtctactcaatgtggtgaaatatgtaaaaacataggaaacattcacaaacatttgcatataatatcccactcatgatttaaaatatagatatatgtgtatatatttgtgaaaagaaaagacttcaggtatatacaccaaactgttaacagtaacagttaaaaggcagtaatacctgagtgataatatttcactgcatttttttatttttctgcttaccagtttacctttttagtaaaaaaatacatatatatatataaataaaacatatacacacaaatatatatacacatagcctacacacatacttacatataattatttctatatcttttataaaaagataagcttggttctacttttagagcctacgagttgtaagagaatcctagccattgctcacctttcctttgtgctgaattcggtgaagccgcaggttgggctcaggaatggctacagagtctccaatgagcactccccagctctgcactatattgtacaccatcactgcatagcaaggtccatctgaatctaccaggccaaatgtactaccaagtaaagacagattaggagagaggaaaacaaaaaggtatgtgggtaggaaagaagagcagaaacagtggtttaaaaatactagcaaaatactggacttaaagtcagtgacaggtaattaaaataaaatataaaatttaacttaattaaactttaaaaataaaatactaacaaaataaacaaatgctttttctcagttactcagaaaacctatgagaggtaccatcttccactttatatatctgagtcttcatttttctgaaactcatcagtcactttgctaagaacttaggacaaagcacactgaagccattcaacaaatattaatgatgaactagaccaacatgttacagttgtaacattattcctggtctatcaatttaactatcatactcttaaccaaagcctctaaccatcactgtctgtgtagtttaactccacaaactttcactgaatattacatatgtgccaagcattgtgtttagcaataagataccaatccagctatgaatgacctatagtctagcaggagtcagacaatgaagtcatcacttacagcacagtgtgatgggtgctagaatagcttttcccttgtgctgaattcaatgaagccacagattgggctgtgggagcccagaggacaaatatctaaatcaaaattggaaagcagggaagatttcctggaagaggtgacgctcaaagtgaatcttaaagggtaaaaaaccagctgggttaaaagagaaaaattaatcctcggtaaaaatgttaaaaacctctgaggggataggaacagagattttgacttggaggcaacatcagggaacttcccagaatggtggtaatgatctctatttgggttatacagatattttccatttgttaaaagctatgaaatgtacgcttaaaattgtacatttcattgtatgtaaattttacataaaaagaaaaaattgaaacaaatactgaactcagttaatgactgcatgctaaagtatgtaaagtatattgatctctgcaatttactctgatagcaggataaacagactgatatgtaataagctaagtaaaataaaatattaatggtagaatataagtggatgagaacacaaatgttcaatgtaaaactctttcaacttagctatatgtttgaaaatttttatacaaaatgttgggggcagaagaggatgttagctatgtcaagaagaagctagagattatccaggcagagtaactgtatgtaagacacagaggcatgaaaacagctgttctaaaaccaacaaaattgttccatggttgaaacaaaaggcactggtgggaaagagacaaaagataatagaaagagaagcagggagcaaatcatgaaggactttgtatgctaacctaagtagttcacactttatcccaaaagctacatatagtaccagtaagggatcttaaataagaagtagcaatggtcagatttccatctaagaaacatttctctggcagcactgtggaacactggaggaaaccagagaatcagggagacctatctggagaagtgataagggggtgaattaaggtggtaaacacagagaagtcaagtctataggacaaaaaaggcaaatctttttggagaatggagaagcctattcttccaaaagtcttaatcaagtgactgagaggtgataccattcattcacaaggaatccagggaggagaagcaggtttacagagaaagatttaggtgagtaatactgaaatactgagttagagatttcttattggaacccagaagcagatggttataggaatccaacacttggaaatgaagcttgggctggagatatatctgtaagcatataggaggctgccaaagccttgggtttatatgacatcacagggcaagatgatctatagacaggatggagaagaatcacactcatgccatcacgtgacatgcctgaattcacaggaaatattgcaatcaagcaaagcactctcctgatgaatccagtcaaagcctcagaatccttctacacagtatgtcaggcaaccactgacaagtgatcaaagttggcaactataggccatcctgatataaagagaaaaaaggaaaaaaacaaaaatagagtcctgggaacctaagatttaaaagttaggcagaaaaagagaaaccaaggagtggcaaaatatctatttgttctcaaggtcctccaaaacctacctttgtctatatccctttctaattcttctcagctctaggatttgctctagtaaactaaactgttctcaactatctttttgcccttcaactcgtcaaatatacaaacccctagaaaatgccatggagaaagcttgggcatataatgggaattgtgaatatttctgtttagatgaacagaaaggatgtgaaaagcaatagtgagagataagtcagaatgttttggaaccatgcaatagaagttgctggatccagtgcctagaaagacaatggtgatcctaggaaaataacaatttcagtagaaaagagaaaggggaaaccggtcaaccagggattaggaagtgagtgaaggaccaaggagtggtggcattcactaaaccgtaacttttcaagatccaaaaattttctaaacaaatattcttaattcatttcctctgctgctagaagcacctgcacctgggtcctttacatttcttttttctcactccctatgacacatatattacacactcaataaatatttgttgaatgacatctaagacaatctcccaaccagactttaaattataactcaaagctcacttttcagaactaagtatacctaagtacaaacaggactaagaaatttgtcctccttcaacttctatgatcatgaaaatgcaaagggacagaagaattttgaggtttctgtcttataaaaaaatatgtcctgccaaatttcaactatggatataggaatccacatagcaccaaactcagggatacaaaatgggcagtgacagaatctacaaaagcctctgatcaaaagatggttaaacatcacccagacaatatctgcccacgggatagtcacagaaggaaatcagaagtcacaaatctgtgaccactgacaatctcctcaactgccagggaaagaacaggaagtgagagcaattagttcaaaagggtaaaatgggggaaatccaagagaaactcacaaggggactttctcctctgtggtgaggctaaataccacctttcccaggatgacggcaccgctgttcaccccaggctgaagcgtactcagtggcttgagctccagggtcactttctgcccagaggctgactgatagtgcccatcactgcaagggcctagatgggctgggcgcaagcttcccagcatgctctgcagctttttggtcttcacctttccctgcaaagaaggggaaataggtaagaagctggaaactagtcgccttccttgagattctaatccttccctcccacccacttctatagggtctctacctcgtaaacctatttattcttattttattgacccacgacaaaataaaaaaaaaaaaagtggaattcagcccttcagacatttttaccttactctcaaggaggctggttaatctatccaggaattccagaagttgttgctctcgttgccggggctctggccaggcagggtccagggctgcagcccgagagaagccctccagggcctccccataactctcttcatatttatgcaactgtacaagaagtgtatcccaattataagtatatccagacaaactatcccgagggaatggcaccatgggctaggaatctagagaaataaactgttttccttcctggttattttcctgtgctgcaacaaacagcctgaagagctggtaacaccttacatccttcttcctagccaagatgatcacaaccccaaagatggaatcatttcaaagaagctaatttccaaactctaaaatagttaagttgtatatattggctcacttgacctttatatttacttaacatttcagaagtcttctaaaagatccccccattctctacctattcttccacctccacagccccttctcctttccctccagtgactacaccagatactgaagccaaaccgagctagctatttatagaaatagcatggctttcctctcgcagtctgtacccaatcttgtccctatgcaaactcagttatcctcacaagctaagacataggtgtcttatttatttgaccctcagatgactacaccccaaaggtcttaccgtcgccctgttcagatgaaggtcaggattgctagaagcttttctgtcaactttctcctataatgggatgaaaagattatcagtggatcctgtctcaatgttaaggactgacatgcccaacatgtcctacgcctcctctttctagagaaatggaagtttcttccttgccaaaatggtatttataccacagaagcagttaccgtataacagtgtggatatcttagtcccaaaaccttagggatataagtgtttttgtatgtgtgagacttcaaaatattattataatttatccatgtagtagtattaagatagaataaatctttatataaatgaaatatgtgggccgggcacagtggctcacacctgtaatcccagcactttggaaagccaaggctggcagatcacctgaggtcaggagctcaagaccagactggccaacctggtgaaacactgtctctactaaaaatacaaaacttagctaggcatggtggcatgcacctgtaattccagctactcaggaggctgaggtagaattgttttaacatgggaggtggaggttgcagtgagccgagattgcaccactgcactcgagcctgggtgacagagtgagacttcatctcaaaaaaaataaataaatgaatgaaataggtgaaatcattttgatttttaaaaatttaaatagtgaagtgctggtaataaatgaagaaaggctaggatagaaatggtgttcatttaatgcatttcctctgcccataaacctagctccagacacatgcggaatcatgtttctacatccaagttcccttaaaacacagatagaaaaccaaattcagactctaactaaaatagatggccaggaaaagaattttttttaaacagataaaatagatggccagacaccacaagacagtgcagaccatgtgctgtgaagcaactgctggctatgttcatgactatgcttattatatttttttaattctcttcattacctggcgcattgtaaaagcacaaacaacatgaattaaaattgtttaaatggttggttcagatatgtttacaaatgcaggtctgggcgaaaaacttcagattaaaaagagatgaccaggcacggtggctcacacttgtaatcccaacactttgggagaccgaggcggatggatcacctgaggtcaagagttcaagaccagcctggccaacatggtgaaaccccgcctctactaaaaatacaaaaattaggcgggcatggtgtggcacgtgcctgtaataccagctacttgagagactgaggcaggagactcacttgaacctgggacacggaggttgcagtgagccgagatcgtgccactgcactccagcctgggtggcagaatgagactccgtctcaaaaaaaaaaaaagattaaaaagtgactatttagcagaagccaaatataaaatgttgaaggaatataccacactattctttaaaatgtaaacattcaccaaattaagaaattagagtaaaatataattgctctaaaagttccgtgattgaaaaagggcagtttaaagtcaaaggtagagttgtggggagagtggcaggagggggagaaaaaccaatttaaaagggcagtccctgaattgcaaacatgaacatacagtaactgtgttctttattctaccacagggagcagaataagtaatgataagttaaaaagcaattctctatatcaagagaagcaaaagaagaaaggtaaatatgagagctaaataaaaagtgctcagaggaccaatgtgaagtcagaagccaattctaataatgagaaaaaaggcactcaaagtctgagggaaagccctatgcaaatgcctatcaacataaaaatgcttgaaaacctaaataaatttcttgaaaacctaaataacctaattcacttaattcctaggaaatgacacagaacaagctacacattgttttctcttttagcccatgggaaatccagagccataatattacctaacggttaatttggggatagcacttaatttacactgaagtataagttttcattattctttaaaatgaatgtacaaaaatattaataagtattattttaatagacttttttcccattaaaaaagatgaacatgttgaggcagctctgtgatttggttatatatgtgtgtaagaaacccagacaggtcaaggagctatccagcaccaatgcgacacgatgcaagtggttcctaacactcaagttataagaagtcagtcatctctgcagacacatctttgcaaaatcacaaaaatgagatgccagcaaacactgccactgcccatgatgcttgctaaagggccacaaagaagactgaacaatgctcttgcttctgttgttgcctattcatctggcctggtgaccataagtacttactgcttgggcataggcactgagggcttgctgggagatcttagggttctggccagtagagaagtaaagggaaagatatgaattcccaagaatatctgaaagagaaacacagtgacaaatcatctcagagtccaagttcaagatatgacttattttgatcattcttgaaagtatatttgaaaggtcccacaagaaatccaaaccaggaatgacacgatacttagtatacccaaaactccactaggatagagcaccaaggacaccaaactgaagtttgaacagactgtacaaaagcccttccttgcttacgtgaaaactaggatcaaaagatcgaagagttcctagaaaagtagttccccaaaatgtctttcgtgtgtcttcaaaacaaagatgccctctctggcttaaacctcagaatcacactcaaaagagggactgcaaatgttgctctgattgaaaacatctgctctagaaacctgttggagatcttttgagagcactcacaccaggagcggccatcatggacatccatctgaacagccaacttagcctgtcggacactgtccatgacatggtgagaatgttcatcttcagtgtcagtccgcagctgacgaagcaccattgacaggttttgcaaggagactttgttcctgcactgcaaataggaagggcacatactcaatcttcctgattctacctcccctttccagatctattctgaactcagtcttctaaatctaattttttacctttctaagttttttgttttgttttgtttgaggtggagtcttgctctgtcacccaggctgaagtgcaatggcgtgatctcggctcactgcaacctttgcctcccgagttaagtctttctcctgcctcagcttcccaagtagctgggactacaggtatgcaccaccatgcccggctaatttttatatttttagtagagactgagtttcaccatgttggccaggctggtcttgaactcctgacctcaagtgatctgcctgcctcagcctcccaaagcgcgggattacaggtgtgagccaccacgcctggccgtatttttctttttgtgacagggtctcactctgatggagtgcagaggcacgatctcagctcacagcaacctccacctcctgggttcaagtgattcttgtgccttggcctcctgagtaactgggattacaggcacatacaaccatgcccatctaatttttgtattttttggtagaggcagggtttcaccatgttggccaggctggtctcgaactcctgacctcaaatgatctccccactttggcctcccaaagtgctgggattacaggcatgagtcaccacgtctggtccatgtatatatatatattttttttttttttttttttttttgtagagacaaggtctcaccatgttgcctaggctggtctcaaactcctgagctcaagtgatcctcctgcctcggcctctcaaagtgctaggattacaggtgtaagctaccacacccagccctaattttttcatctaaattcttgctgccatctgtatcttcaacccccatccacagggatcagcttagctgctagcttttcttcacttcctttctccccctgaacctgatcccatcatcatcttcctttcccaggcccctgcctctattttcctcattcaggtctgctctctgacctttcctccctcctgattctgtcctagttcaatttcagttctactctggtattcatgtcctagggaaactcatagaaccaaagaaattcatccttcccatctctgctttccaaagggatagggggcagctcacatgggtgagggctcctgagaagcaggtgtgggcagctgcaacatccccttttttccagtacacctcacccagctggttccaggcttccaccagctcgggctccagcttcacagcctttgacagaagctcctcagccttagggctatagtcaggagtcacatttagtgctttcccagttagcattagaacttgtgccttgccctggacagaacctaagaggaagaaaaaaagataaagtgggaaaaaaacaagttaaagaccagggcactttctctcaaaaaataactacacgtcagttttaggaataaaaagagttggggaaaatatttatcaataaaccatttattgaaagctcaccataggcagagtgtatgttagctaattaggcaacaaagaaagcactatttctagagcttctgccatctgtttcttgggcccctatctacaaggatcagctcggttgctaactttcctagaggggtttacaatctagtggagaagacaaagcgtaaacatggaaaattaaaaccatgaaaaagagcatatggcattagcccaatgaatgggctttaacaagtgaagagaagatgagtcaggacaaatagttatcgttaaaacaaaacagagagagagaagaaaagaccctccaggttagaaaatgatataaacaaagacacagaatcagaagtacatgtggccatgttcatgggagaatagacagttcaacctggatgaaacagaaagttcctctacaagtaattagtcagagataaggttagaaaacagagtaaaacaatggacacttaaataccaggttaagggggttagacttcagctagtcaatagcaggaatctttaaagatacctgagcaaaaaggcagatgagaggataaggttaaatgcatgaagtaatgatttagaaagatagccatggccatggtattatataagtggatttgaaagtaaaagaaattagaggcagaaagtcagattactgcaatagttcaagtaagtatgctctttcatttcatgccatttgctataatcaaattttaggaaaagtggcttagggaatgaaaggttgcacaggggccctgagaagtagtattacgttgtactaccctatagcagtaacagataggataccaaagagtcaatgaggagggagcaaaggtcaatcacatttcactgaaggatgggggttgtacaatctctagggctcatacccactacttcttccatctgctgtagggttttctccatctccttctgcacatcctgttgcttcctcccagcatcctcaacactatgtgtctcgaaatagcagtctcgaaatgagtagagctgatccacgagttcctaaaaagtatgacaatggaaccattaagtggaaagatcactggatagggaaacttgaaattggctagccataccagctcttggtctagaaataccaattctctttctcacctatgaatggcacaataggcaggtggacaggtttactaaaatgccacaaatcatgaggaaaagcagccagtaccccaggccagctctcatggtcccatgttgtcccatgccagtgtctctattgtgatgaccattttctctccctgcctcagcagggcttctaatatgactaagcacttcacataccacagtcatgaggagggaaacactgcaacttaagataaaccaaaagttagtaagatcattctatatggtcctggtcctcaaagaataacactttgaaatttacccttaaagttggacttctcaactaaaaccattttatccctgatttttcatatgctgagatctgaaaatacaacacaacctttgtgaatataataaacatgttagagagtcattgttttccaccacaaacataccaatttgaacttggtaactttggtatctttgcagcattttgttcttttaaatgcttattgtggttttgtttagtttgatttttttgtcaagtcatcttctggctgccttggattttttacaaataaatattctctttcctcttaaatgcctctgagtcttcctgtcacaccaggcaaagcttttctactacaggtcaagcatccctaatgcaaaaatctgaaatcctccaaaatctgaaacttttgaaacgctgacaccacaagtagaaaattccacacctgacacacagtcaaaatgcggtcaaaacgttgtttcaggcacaaaattattaaaaatattgtatcaaattactttcagcctatgtgtataaagtgtaaatgaaacaattttttttttttcttttttaaaagacagggtcaccaggcgtggtggctcatgcctgtaatcctagcactttggtagtccaaggcagacggatcatgaagagatcgaaaccatcctggccatcatggtgaaacccggtctctactaaaaatacaaaaattagccaggcatggtggcgcacacctgtagtcccacctactcgggaggctgaggcaggagaatcgcttgaacctgggaggcagaggttgcagtgagccaagatcatgccactgccctccagcctggcaacagagcaagactccgtctcaaaaaaaaaaaaaaaagagtctcgtaggttgcccaggctggtctcaaactcctgatttcaagcaatgctcccacctcagcctcccaaagtgctgggactacaggcataagccaccaagtttcatatttagatttgggtcccatccccaagttatctcattatgtatatgcagatattccaaaattcaaaaaaatccaaaatccaaaaaacttcgagtcctaagcatttcagataacagatatcctattctttcctgaaactaaatagatagcagcagaaagatataatcacttcccttcgagtgtaatcaacaatcttcacaacacatcctgaattcatccacctgtctccatcccactatgaccattcctggattacatcagcttcattacttgcctggactgcaagagcttcttaaccagtcatcttgtttctgttctctcccattctcctcactgtagtgggagtgatcttataaaaaacgtacatcatatcacaaaccttcaaatagtttcccattgcagacagaataaaatccaagtccttatcatgacctagaagactgtatgagctgacctaccaccacccatcctgacacaaacttcacctctcaccattctctctcctacaatactcaagccagagttgccttcatgcagtttctcaaacccatcaagctcagcccacctggaagaccttatgcctggacactttctccagatctctgcataacttattcctcatcatcatttagatcttaggtcaaatatcaattccagaaaggttttccctaattactcaacccaaatgaatccattccttctctcctctactgttatatcatactcttatttttcttcatacttatttaaaatcatgtggcctatcattaattgtctattgtctgcctccaccactgaaatgtaagctccaggatggaaaggcctttaatctgttttgtttcgagctacacctgagcaccagaacgggacttgggacatgataggctctaattcactacacttgattgaattaactaactaactatccctgttctaacaaatacatatgtgctatacttaatttaaaatcctatccagaatgaagggaacagactagcaccctctgcaaattttattgtattatatccaagacccagcctgcagagactctgattttaacagtttagcagaactcaaaattctacatttttaacaggcaccccagatgactgtaatgaaactgtctgtaaaacacactttgagaaatatccatttatacactctttttacactaaaatgtctttaacaatgaaatcaaagtttaccaccatctccatgaacagcaacaccattatctaatccttttcctcttctctacttcactcctttattccattcctgcaccgaccccaccccaagataacggaagtatcctctcccaagctgcttaggacatttaccacaaatgaacctaggaaaagacaattctcataaaaaattacaaccaatttccttttgtcctgcaatcaacatggctgcaaattaagagttttagagaagggcttattgattggttttagttgttaaaccaaacattcaagaagttgtttggttttattgtttggttttgttttcctctggactgaatgtttttagaaacttattttttcatggcaaaatcaatacatgtaagttgttaaaattcaaatagatacatgtaaaaaaaagaaagtacaaaattaccccaaagaacctcagtgataaccactgatttgtataccttttcagatttttttctgtgcatatacaaacatatatacacaaataatgtttctaatatagaaccagaattgagaatctctgatttcagccagtcacagttagggaataaaatgaagttaatccaaatcagctggaacactctaaaaagtgttactattttaatgtacccaagaacaaagaaatttcaccagtatttaaatttgtgcgttaaacacctttaggcaagttacaagcctgtcatagttctaatatttaagttacaggctgccttagaacgaagaactgagttcctgaggtgtaaggaaaatcatgggttcttaaaggcaaagagccaagcaactagttaacgcctccctaccaagtccaaaagactagtcttacctgtggactatgtggagtctggacccctctgcatcagaccccaaagtggaattacacaggttgaaagaaatcaaaactgaaatcctaaggggagtaaccaggacacttgcagtgcaggtcattagcgtgattgttgccaaattcaaagcagaaaggtgttaaatggcttttgtagggatcaaaacaacatgtgacagtagttcatgcagatctgccacacacatgtatatgctattcgctatggatgaatcgagaaaacaacgtcctctctaaaaatgtacatgaacagttaggagcaacaaatcttcttccatacaggactgaaattaaccgcagtcaggtcggcagcaggaggttccaacgaggctccctggctggctgcggctgcaccctcgagggttgttatagtaaccacacagacgcacgcagcttcgcgtgtgtgccgaggaattcacgggcagtacataaactggactccctgcttcattcggagtaacaaaaacacatacagaatttaatctacggccccacctgcaatttctgcaagatcggcttgacttcttcctcttcatcagccatcatctcccggccactccacccccaactttataaccacagagacgcacgccctctctcaccgcggaaccacagcgacatctggcgttctggaggcttttctgccccagaagggctttgcttcaaaccgacttaaccatttatttccacagagatgctctacaatcacttgtgagttcataaacttctttctttcccagatcctggaaacaaaatgtcctcagcttaatttctatattcttgtttcatgtcttcctacttatttatactaagattataatactccataaagaagagagtttaagaagtgcacacctgtgttgtttgaaatttcgaaagccatgtagtacaatagctactttactcaatcttttccaaactttgcagtaattttctatgtatgattaattttatcattttaatgcactatcttaataaatactacacttgggatggctcataaaaaccaccatgctctacactaacaatgcctccatatttatagacaacatccagaaggatatataagaaaggatgactgtctctgcagagggaaacacagaaactggggaactgtgggtgagcgaagaaaattttcactgcctgcccttttgaattttcttgccatctatatgtatcacctattcaaatataaacatttttaaataaaaaattatttgcttctacatagtctctggaaagagacacaagacactggcaagactatcgcttacaaagagcagaagtgagtggctggagcaaaaatgagtgaccagggaactggggtagacttttcactctatgccttttttgtaactttaaagtttgtaccttgtgaatatattaaacttctgaataaatcttttaaagtgtcatgtaa

SEQ ID NO: 1234 - DNA, 368 bp, Homo sapiens
caattcatctgtatacattaatgtattacagccattcagttgttgttgctgtttgagacggagtctcgctctgtcgcccatgctggagtgcagtggcatgatatcggctcactgcaacctccacttcccaggttcaagcaattctctgcctcagcctccccagtagctgtgattacaggtgcctgccaccacgcccagctaatttttgtatttttagtagagacggagtttcaccatcttggccaggctgatcttgaactcctgacctcgtgatccacccgccttggactcccaaagtggtgggattacaggctgagccaccgtgccaggccaattcaattggttattaatcctcactcacatttctc

SEQ ID NO: 1235 - DNA, 107 bp, Homo sapiens
gcctcccgagtagctggggctacaggtgcataccaccacgcccggctaattttttgtatttttagtagagacgggatttcaccgtgttagccaggatggtctcgatc

SEQ ID NO: 1236 - DNA, 32191 bp, Homo sapiens
tatcacccttaacaaatacatatgaaaatatcttaaccacataggcagactcttgatgatactggtaaaccgtttctaccaaaagagattttagatgcccttgaacaaactgtctggaaatgtttatctaacttcaaataatcctttatctaaaaagtgatgcttagcaatatgacaaatggttggttgaatttttttaatgtttaaaaacgagtaacatttttggtttaacacatttaaagaactgatgaactggctttaactattacatacttgagtaccttttgaggtctagtttttatacgaataggcaagcagagtaagttcacgtttcacctctaaaacgcagtgtgaaggatactttacacatgtatttgaaagaataggctttaatagtcaatgtgcttctttctgtttttgtcattaagaaattaagctgctcagcaaggaactgcggagcttcctgacagctcttgtatcactgctctctgtctatgtgaccggtgtgtgcgtggccttcatactcctctccaaagtaagtcaaatcctcttgcatggaatgtccctatatccttgaatattatcaaaagaaaaataatttctatctctccacaagttatgggcctcagcaagagctccctaattaacattttcctgtgcatctgcagggaacaccacctgcagaagaggtctttggaagaaggcatcatacattctcatcactgaaattattagccaggggacatagtttgctgttttctctttaaagcccagtagcatgggattaagaagagagccatccactatgctatctttctgctgtaggggtgaggtgtgggcaggtggagggcgagatattactgttatctacgaaagccttaagaacagtctttaagaacaaaaatgggttgatgaagaaactaaaagccgccttaaaatcttcaaaaagggctaaagttattaaaaaagaataccttttggctatgtgtataagaagggagatgtataccattgtgttaggattactataaatcctacaatcaacgtcagtttgttcaattagtttttaatggagtaaaagcatctcaaaaatgatgtaaaaattaagtctcattgtatatcacttaaatattaagttagtttaatcttattagggcatgagatatctgccaccattgttatgagtacataaaatgtttcatagactttccttctcttcttggcagtcaaaatccaaccctctaagaaacaaagaaataaaagaagactcacaaaaggtacagaccaacacttgaaaaatattttttaaattgtggctggttgtaacgatttcaaaactgaaatattttttagcttttaaatatttaaatgttaagtttaaacagaatatcaaggtaactttcaactgcagacactatttcctattgttgagaaactcaatgacaaaataatctcaaggggtaaactgtgacttaaattggacagttctcaaccataaattatatttaaagttctcaaatacaaaagagttaactgtaggcacatatgtgttgggggagggggtagtttttgggaccggtggcaatagagcaagaaaagttctgatgatgcgtcgttatcatcgcttatattcccaaaagagaatttttttttctcatttgtctttatagaagaagagtgctcggcgtatttttcaggaaattgctcaagaactataccataagagacatgtggaaacaaatcagcaatctgtaagtgtaaaatgtcaaaaaaaaatgtaaatacagatataaagcacgtttgaaaaaactaagctgccaaggagctgtcaagaaccatgttttccttcagaagagtctgaaagagaactttcacaagaatgtatttttatatagaacctgttttaataaatacataacaaaagacatctgatacaatattaaatagccccaggctggcatcttagtgacatggaaactttcagaaacacattagacacgagcaatgttttcaatacagacaatgatgctttaaaaggatagattaaaagctactctgtacagtatcctgcatgcagtggtaggcgttcagtagatactgcaaatgtttgtgggtcaaattatgaaaaaaaattacttgttacttataaggcaaaaataaattcacattagaaaagatgcagctaatgatattaaaaaacaagtatttctccagtgtctggagttgaactgaaaagaatacatgtatatctataatacatcctgaaagtattcctttaaagtcttatataaacaggttcttcaaacaaaatattatcttaatgccaatagaacagatactttgtttccatgatgcatgatgagatagctcaaataagctaaaatgtatacaaaataaggttaatttatttttatttattttttaaaatttatggaatgcttcacaaatttgcatgtcatctttgtgtaggggccatgctaatcttctctgtatcattccaattttagtgtaagtgctgccaaagcgagcacaaaataagctgaactgataaactagtaaagatattttcctcttaaacagcagccaagagggcaaatgcatcaggagactgaaataaggcgatttttttaagtccaacttttactttaattgttttctttttaaaaaaatatggaacgcttcacgaacttgtgtgtcatccttgcccaggggccatgctaatcttctctatattgttccaattttagtgtatgtgctgccaaagcaagcgctaaaaatctaactttcacaaaggatttttgccaaggaaagaatattgtctaagtagtcgtttcatcctacagtgtatatatgaatacataaagataggtggtctaattactaagatgccatgctgagtaattacaaatcatttttctttctgaggctgggacatgttttcaacaacaaggccgaggtatgtggcctgaaagcagtcttagaagtgagaattgtaaagctcccagccacgattttgacagtagcatccaaacaaaaaaaaaaagtatttttcagttcccacatcctactctaaatacggatggggaaaacggtaatctggcctttaagattaccatatggacacttaggacccagaatccaagatggcccagtggtttgcatgttccttggcagttggcttcattggttacataaccttaaacatggctttctatttatttattattgcaggagaaagataacaacacttatgaaaacagaagagtactttccaactatgaaaggccatagaaacgttttaattttcaatgaagtcactgaaaatccaactccaggagctatggcagtgttaatgaacatatatcatcaggtcttaaaaaaaaataaaggtaaactgaaaagacaactggctacaaagaaggatgtcagaatgtaaggaaactataactaatagtcattaccaaaatactaaaacccaacaaaatgcaactgaaaaataccttccaaatttgccaagaaaaaaaattctattttaaacttgtatcctgagtctgtttcattcaacatgagatgtgtgatgactgccatcctgaagatctgaagccaaaccatgtgcctcagtcttgagtggaagaatcacctttatggtttgtggaaatcatggcacaattaaaataagttgggagggacaacgtgacaaaatttgagttagagacattcattttgaaaagcaccttagtaaagttatttcctctgatgttgtaatggggcagtggggtaacgcacatttgcctgccagggtatgcaaagtaacttacatcatgctatcagcaaaatgagaataatatagtggctagagtaagaccataaaagccaaaatacagaaaatccaaagctgaaggttaaacagaggtaacttcagaacaaataagccacaacggactctagatgtcagtgttgtgccaaataacagcaccagggaagatgtgggcaacacatctactttacaagcacgtttgtaatactgattttttttcttttcttttttttttttttttgagacagagtctcgttctgttgcccagggtggagtgcagtggtgcaatctcggctcactacaacctccacctcccgggttcatgccattcttctgcctcagtttcccaagtagctgggattacaggtacgcaccaccacgcccggctaatttttttttttttttttttttgtatttttagtagagacggggtttcaccatgttggccaggctggtctcaaactcaagacctcagatgatctgcctgaaatggcctcccaaagtgctgggattacaggcgtgagccaccgcgcacagtctataatactgatttttaaccaatttaggagggaaatgtcagataggaggcatggtacaaggatatttatggaattcattaccacttcactaagaaaacatgatataaattgtcctttgaaagctactttggtataaaaaaatctaaagtgcccataagtatgcattcattattagacacaaattacaaccttacaacctactatgtttatttcattaaagtgtctcttttaggccgggtgtggtggctcacgcctgtaatcccaacactttgggaggctgaggcaggtgaatcatgagatcaggagttcgagaccagcctgaacaacatgatgaaacccgtctctactaaaaatacaaaaaaatttagcggggtttggtggcacacacctgtaatcccagctatttgggaggctgaggcaggagatcacttgaacccaggatgcggaggttgcagtgagctgagatcacgccactgcaccccagcctaggtgacagagcaagactgtctcaaaaataaataaataaataaataaataaataaaataaagtgtttcttttaaactggtattgcctaaggtgtattctttataaaacttagaattgttaaatattttaagattcctttgaaagtgtttttgcattgatggtttaaatcagtgatatcaaactttcctgatcctatgtgcccagaaaaatgggcaggggaaaggaggcagcatggaacctcatttttttgtgtgtatctgtgtgtacacgtgagtgcacatgtgtatatgtgtggggccacatgtgttttgtatacggtatatgcatgaaaatgtacctttgtaccttatacacaaaaacaaattaaacaatggcataagcagcaatataaataaaaaatgctaatactttcctgccatattccaaaataaactgtcttgtgtactctgcagtgtgtacttccccactctgagaccactagctcaggtaaagtaatgagcttctaagccagactgcaaaaaagggcaagcactaataccatcgaaatgaacagaagtgttgaattcgatcatttgcttttcatttctgggagtcattacattttggtactgaattccaggactgaaaatacactgttcattgtctaaccaggagacaaaatccctcagataaactagtatttgactcacaatatgcctttcccatgtaagcaaggaccgtgtttcaaagattgattttgaagctgaaatacggaatatactttcgcaaagagttccattcctctaggtcttatataagaatatctggtgtatacacagtattcattcatttattcatctatctcaccaaaagtatatattttcaaacttcaaaataagttttatttgggaagagtttcttattttgttaaagctacaagcaagtttctttcccaattacacttctagagatcttagcagtttcagagatttcagtgttcaaaagtatatttcaaaattaacaacaaaaccaaacccacaccaaaaggaaatagctttgagattagtttgggatgtacagtcattgatttcaggcgccaacactatttactgagtgctacactatacaatcaaaggcctcttttgcaaactatcctcgggtcatactgaacttgctccacccccacacaaaccttactcacaccttcatgcttttgcacatgctgttcccctcagcctggtaaaatgcttcagactacaaacacagctcacctcaacatgaaaccttccctaactcacccacaggctaacagatctattcgtctctaattcttcagtacttagtttgacatatttcttaccacaatttcctgccattatctgtttctatctatattgtgtactattctgtgttttaagagcaaaagcgtgattctcatttatctttatatttccacttggtacacagtaggccctcaaatgccttctataaatgcaattgaacaatgtttctatagaaaaatgttccttcagcatttaaattgagatatgtagcatacttcagtccctcaccatgaagcttcacccctttccataaagaccattcaacaaaccccaacagtactaattgtcctgctatctgagcatccagaaaagaattaaactgcaactttttctttcttcttgagatggagttttgctcttgacgctcaggctggagtacaatggcgtgatctcggctcactgcaacctctgcctccagggttcaagtgattctcctgcctcagcctcctgagtagctgggattataggcatctgccaccatgcctggctaatttttgtatttttagtagagatggggtttcactctgttggccaggctggtctcaaactcctgacctcaggtgatctgcccaccttggcctcccaaaatgctaggattacaggcataagccaccgcacccagcctaagctgtaactttctgtttagatttgggtttcctatgacaattaaaaaagaattaatactgaaacaacttgttttacttcgagctgcaaaaacaaattaccatagactgagtggcttattgagaggtgacaatgtgctagcagccctcgctcgctctcagcgcctcctcggcctcggtgtccgctctgaccgcactcaaggagcacttcagcccgccgctgtgctgtggggacccctctctgtggctggccgaggccggactggctctctgctcgcggggaagtgtggagggagaggcacgggcaggagccgggctgcgcgcagcgcacgcgggccagcacaggttccgggtgtgtacgggctcagcaggcccagcactcggtgccactggctggtgcctgctgggcttaatcaggggacaagctccctctgggctgctggagtgcccaggctaggtgccacaaagtcccgcagccagtgccattgagaggtgaagctggctgggcttctgagtcgggtggggacctggagaacttttctgtctagctaaaggtttgtaaatgcaccaatcagcactctgtgtctacttaaaggtttgtaaacgcaccaatcagtgctctgtgtctagctaatggtttataaatacaccaatcagcgctctgtgtctagctagccgggtagcagacttggagaacttgtgtctagctaaaggattctaaacgcaccaatcagcactctgtgtctagctaaaggtttgtaaacacacaaatcagcgctctgtcaaaacggacgaatcagtgctctgtaaaatggaccaatcagctctctgtaaaatggaccaatcagcaggatgttggtggggccagataagggaataaaagcaggccaacagagccagcagcagcaacccgctcgggtccccttccatactgtggaagctttgttttttcactcttcgcaataaatcttgctgctgctcactctttgggtccgtgccacctttaagagctgtaatactcactgcaaaggtctgcagcttcactcctgaagtcagcgagaccaagaacccaccaattccagacacattttggcgacccagatgggactatcacctatcgccaagtggtgagactatcgcctatcgccaagcggtaagtaccatcggacccttttcacttgctattctgtcctatttttccttagagttcgggggctaaatactgggcacctgtcagccagttaaaagtgattagcgcagccaccgggctaaagacatgggtgtcaggctttctgggaaagggctaacaacccccgactcttcagagttgggagcggtggttggcctggaaccagcttccgcctttccagtacttctgggctgaaccgagggtcgacagagaggaaagccattcagctccggggtcccaacaagaagttggttgaccctgcggccatgagcagaactctcaatgtcgcccaagcgagactagcccatctattctatctaccctgacccttgcctcctgggtcctaacgcctgtcagacaaacttcctctcacctcttggagtctctgaggctagtcccacttctcaaaatcactccctgtctctggtgcttttccagtttctcctatgaggatgatttctagtataaactccaggagtctactcccttctttaggcacctgggctcaccaatcagaaagacataatttttgcccaaagccccgtcatagggggaactctggaattttaggatccctccttagaaaagcaggcctaacaaatgctattcctgaagctaggatatggggagcctcagaaattgtatccttcctattcatataagtgaggacaaaaggtgtcactcttccaaccctggagatcccttccctccctcagggtatggccctccacttcatttttgaggcacaacatctttataggacacaggtaaggtcccaatactaacaggagaatgcttaggactctaacaggtttttgagaatgcatcagtaaaggccactaaatccaatttttctcagtctttgtggtctacgaggacaggcaagggtgcaggttttcgagaatgcgtcagtaagggccactaaatccggccttcctcagtcctccttgtggtctgggaggaaaactaccgtttctgctgctgcttcggtgagcgcaactattccaattagcagggtccggggactgctgcaggttcttgggcagggggagaaacaaaacaaaccaaaaacacaggcggttttgtctttcagatgggaaacaggcatcaacaggctcacccttgaaatgcatcctaagccactgggaccaatttgacccacaaaccctgaaaaagaagcggctcatttttttctgcactatggcctagccccaatattctctctctgatggggaaaaatggccacctgagggaagtagaaattacaatactatcctgcagcttgaccttttctgtaagaaggaaggcaaatggagtgaaataccttatgtccaagctttcttttcattgaaggagaatacacgagaatacacaactatacagagcttgcaatttacatcccacaggaggaccgctcagcttaccccccatatcctagcctccctatagctccccctcctattaatgataatcctcctctaatctcccctgcccagaaggaaataagcaaagaaatctccaaaggaccacaaacctccccaggctatcggttatgttcccttcaagctgtagggggaggggaatttggcccaacctgagtacatgtccccttctccctctctgatttaaagcagatcaaggcagacctggggaagttttcagatgatcatgataggtacacagatgtcctacagggtctagggcaaaccttcaacctcgcttggagagatgtcatgctactgttagatcaaaccctggcctttaatgaaaagaatacggctttagctgcagcccgagagtttggagatacctggtatcctagtcaagtaaatgacagccgaagaaagggataaattccctactggtcagccagccgtccccagtacagatccccactgggaccttgatgcagatcatggggactggagtcgtaaacatctgttgacctgtgttctagaaggactaaggagaattaggaaaaagcccatgaattattcaatgctgtccaccgtaactcagggaaaggaagaaaatccttctgccttccttgagcagctacaggaggccttaagaaaatatactcccgtcgcccaaatcactcaagggtcaattgatcctaaaaggtaagtttattacccaatcggctgcagatatcaggagaaagctccaaaagcaagccctgggccctgaacaaaatctggaggcattattaacctggcaacctcggtgttctataatagggacaggcccaaaaggaaaagtgagatcagagaaaggccacagccttagtcatagccttcagacaaacaaaccttggtggttcagagaggacagaaaatggggcaggtcaatcacccggtagggcttgttatcaatgtggtttacaaggacactttaagaaagattgtccaatgagaaataagccgccccctcatccatgtccactatgctggggcaatcactggaaggtgcactgccccagaagacaaaggttctctgggtcagaagcccccaaccggatgatccaacaacaggattgagggtgcccggggcaagcgccagctcatgtcatcatactcactgagccccaggtatgcttaactattgagtgccaggattgacttcctcatggacactggtgtggccttctcagtgttaatctcctgtccagatgactgtcctcaaggtccgttaccatccgaggaatcctgggacagcctgtaaccaggtatttctcccacctcctcagttgtaattggaaactttgctcttttcacttgcctttcttgttaagcctgaaagtcccacatccttattagggaggggtatattagccaaagctggagctattatctacatgaatatggggaacaagttacccatctgttgtcccctacttgaagagggaatcaaccctgaagtctgggcattggaaggacaatttggaagggcaaaaaaatgcccgcccagtccaaatcaggctaaaagaccccaccacttttccttatcaaaggcactatcccttaaggcctaaagctcataaaggattacaggatactgttaaacatttaaaagctcaaggcttagtatggaaatgcagcagtccctgaaacacctcaattctaggaatacagaaactgaacggtcagtggagactagtgcaagatcttagactcatcaatgaggcagtaattcctctatatccagttgtacccaacccctataccctgctctcttaaataccagaggaggcagaatggtgcactgttctggacctcaaggatgccttcttctgtattaccctgcacactgactcccagtttctctttgcctttgaggatcccacagaccacacatcccaatttacgtggacagtcttgccccaagggtttagggatagccctcacctgtttggtcagacactggcccaagatctaggacacttctcaagtccagacactctgatccttcagtatttggatgatttacttttggctaccagttcagaagcctcgtgccagcaggctgctctagatctcttgaacgttctagctaatcaaaggtacaaggtgtctaggtcaaaggcccagctttgcctacagcaggtcaaatatccagacctaatcttagccagagggaccagggccctcagcaaggaatgagggccctcagcaaggaacaaatacagcctatactggcttatccttgccctaagacattaaaacagttgcgggggttccttggaatcacgggcttttgctgactatggatccccagatacagcgagatagccaggcccctctatactctaatcgaggagacccagagagcaaatactcatctagtagaaggggaaccagaggcagaaatagccttcaaaaccttaaagcaggccctagtataagctctgactttaagccttcccacagaacaaaacttctctttatacatcacagagagagcagggatagctcttggagtccttactcagacttgtgggatgaccccacaaccagtggcatacctaagtaaggaaattgatgtagtagcaaaaggctggcctgtttacgggtagttgcggcggtggccatcttagtgtcagaggctatcaaaataatacaaggaaaggatctcactgtctggactactcatgatgtaagtggcatactaggtgccaaaggaagtttatggctatcagacaaccacctgcttagataccaggcactactccttgagggaccagtgcttcaaatacgtatgtgcgtggccctcaaccctgccacttttctcccagaggatgaggaaccaatcgagcatgactaccaataaattatagtccagacttatgtggcccgagatgatctcttagaaggccccctagctaatcctgaccttaacctatataccgatggaagttcatttgtggagaatgggatacaaagggcagattatgccatagttcatgatgtaaccgtacttgaaagtaagcctcttcccccagggaccagtgcccagttagcataactagtggcacttacctgagccttagaactggaaaagggaaaaagaataaatgtgtatacagatagcaagtatgcttatgtaatcctacatgccaatgctgcaatatggaaagaaagggagttcctaacctctggggggaacccccattaaataccacaaggcaattacggagtttttgcatgcagtgcaaaaacccaaggaggcggcagtcttacactgccaaagccatcaaaaggggaaggagaggggagaacagcaggataagtggctggcagaggcagggaaaaaccagcagaaagggaagagaggaagagacagagggagtcagagagaaagaaagaaagagacaaagtcaaagagacagagacaaagagggagtcagtgagagagagagacaaagaaaaagtcaaagagaaagagagatggaagtagtaaagaaaaaacagtgtaccctattcctttaaaagccagggtaaagttaaaacctataattgataattgaaggtcttctctgtaaccctgtaacactccaataccaccttgttgtcagtgtaaacaagggcgtagcgcgaaagcactgaggccactgacaacccatagccttcctatcaaaaatccttaacccagcaggtttcctaacaggggatctaaatcttaatcaccatacaaaggtccaatcagacataggaggaactcccttcaggacaggacgatagatggttcctcccgggcgattaaggaaaaacgacacaatgagtattcagtaaatgataaggaaactcttgtagaaacagagttaggaaaattgcctaataattggtctgctcaaacttgcaagctgtttgcactcagctgagccttaaagtacttacagaatcaggaaggagccatctataccaattctaagttaatatacactaaacgaggtcttattaatagcaaagaataattgaaatcccaaacttaaaaggttttcaacaaaagtaaagtttgctaaaagttaacagtgtaaacatatattatcctaacttctaatcttgtggaaatcagaccctatcaatactcttcaaagctcaagtccgtcagcacagagccatacaactaatacccctatttatagggttaggaatggctactgctacaggaaccggaatagccagtttatctacttcattatcctactattacacactatcaaaggatttctcagatagtttgcaagaaataacaaaatctatccatactctacaatcccaaatagactctctggcaatagtgactctccaaaacccctgaggcgtagacctcctcactgctgagaagggaggactctgcaccttcttaggagaagagtgttgtttttacactaaccaggcagggatagtacgagatgccgcccagcgtttacaggaaaaggcttctgaaatcagacaccacctttcaaactcttgtaccaacctctggagttgggcaacatggcttctcccctttctaggtcctgtggcagccatcttgctgttactcacctttgggccctgtaattttaaccttcttgtcaaatttgtttcctctagaatggaggccatcaagctatagatggtcttacaaatggaaccccaaatgagctcaactaacaacttctaccgaggacccctggaccaacccgctggcccttccactggcctaaagagttcccctctggaggacactacaactgcagggccccttcttcgcccctatccagcaggaagtagctagagtggtcatcagccaaattcccaacagcagttgggggtatcctgtttagacgggggattgagaggtgacaacgtgctagcagccctcgctcgctctcggcgccccctcggccacggcgtcggctctggctgtgctcgaggagcccttcagcccacggctgcactgtaggggcctcctctctggggctgccgaggccagagccggctccctctgctcacagggaggtgtgaagggagaggtgcaggcgggagccagcgtgggttccgggtgggcgcaggctcggcaggccccgcacttggcgccaccagcccagcgcctgctgggcttgatcgggggacaagctcccactgggctgtcggagtgcccaggctaggtgccgcaaagtcccgcagccagtgccattgagaggtgaagccagctgggcttctgggtcgggtggggacctggagaacttttctgtctagctaaaggtttgtaaatgtaccaatcagcactctgtgtctacctaaaagtttgtaaacacaccaatcagcactctgtgtctagctaatggtttgtaaacgcaccagtcagcgttctgtgtctagctaatcaggtaggggacttggagaacttttgtgtcttgctaagggattgtaaacgcaccaatcagcactctgtgtctaactaaaggtgtaaacgcaccaatcagcgctctgtcaaaacggaccaatcagctctctgtaaaatggaccaatcagctctctgtaaaatggaccaatcagcaggctgtgggtggggccagataagggaataaaagcaggccacccaagccagcagcaccaacctgctgggtccccatccatgctgaggaagctttgttctttcgttctttgcaataaatcttactgctgctcacgctttgggtccgtgccacctttaagagctgtaacactcaccgcaaaggtctgcagcttcactcctgaggccagcaagaccaggaacccaccagaaggaactaacacctccagacaggccgcctttatgaactgtaacactcaccgcaaaggtttgtagcttcattcctgaagtcagagagaccaagaacccaccaattccagacacagaacaatagaaatttatgagttctggtgaggaccctctttctaggtacaggctgctgacctcttgttgtatccttgcatggcagaaggtagagagaagcaaggtctctcggaactcttaaaagggcattcatcccattcaggaaggctctgctctcatgatctcatctaatcctaatcacctcctaaagaccccttcctaataccatcacgatggggggtgggggcctcaaaatatatatctgggaggaacacaaacaaacacgcagtctataacacaactttaagagggaaatgtaatcacagcactttgggagactgagggggcatcacttgaggtcaggagttcaagatcagcctggccaacatagcgaaaccctgtctctactaaaaatacaaaaatgagccgggtgtggtggcacacatctataaccccagctactcagcaggctgagtcaggaaaatcacttgaacccaggaggcggaggttgcagtgagtaagccaagatcgtgccaccacattccatcctcggtgacagagtgagactccatctccaaaaaaaaaaaaagaaacatctcaagccaaacaacagcaacttcaagtaaaaaaaaaaaaaattagcatcatatttaaagtagtaatattttcattaaagttagaaacaaggccaggtgcagtggctcacacctataatcccaacacgctgggaggcgaaggcaggccaatcacttgattccaagagttcaagaccagcctggacaacgccgccagacgccctctctaccaaaaaaatacaaaagttagatgggtgtggtggtatgcacctgtagtcccagctactcaggaggctgaggtgggagaatagcttgagcccaggaggtcaaggctgcagtgagctgtgacagcaccactgcactcccgtctgggcaacagagcaagtccctttcagaaaagaaagaaaaagaaagaaagaaaaaaaagtgggggaggacaggggagggtgttttgtttttaaacattactaagcaaattgctatctagagacctcctctagtaaagttatacatctagtggtgtgctggtaaatgtgtaactaccagcttggagaagaaaatggctatttgcagtgtttgccaatttctatagtgtaaatactcccatcatggtcaatttcaataatggccatgtttaacaaccagttcacttaaattcctaccaaaacaacaatcagctctcatgaaccagtccacgccagctccagcatctacagcttacatgtagacaaccatgtggagacatatgtgctggtaagaactactttcctagatacatttaagtggaaaaaggcaacagaagttatttataattgggaactgcctgtataatttttttaatgtacatacagacttacatttacatagactatcttttaaagaatattcaagaaacctgaacaagactgtggaactggactggatgagaaactttttttgttttgtttgttttttgagatggagtctggctctgtcacccaggctggagtgcagtggtgcaatctcggctcacggcaagctccgcctcctgggttcacgccgttctcccacctcagcctccccagtagctggaactacaggcgcccaccaccacacccggctaattttgtttttatatttttagcagagatggtgtttcactgtgttaactcaggatggtctcgatctcctgacctcatgatctgcctgccttggcctcccaaagtgctgggattacaagcatgagccaccacgcacagcccagaaactttttattgtaaaccctctagtaagttgcttgaagtatttttttttaattactgaattactttttaataaaaattacaattttgaaaaattaaacatcattaaatttttatttttacaatataattatccttctcttgacttcatatctttccttctttggggggtgcttaaaataattctcactagattcaataacccctagccaaaactgggtcagtaaaccaaataaactgaaattagaatggtatttttttcattttttttccaaatagcaaaactgctgtggttcaacttcaagccatttaccaaaacaattacctaagtaatcatttcacctacaactacttttagttaaaaaaaaacaaattaagccaagtatgcaaagcacactcagatatcctccaacagtccagcattcatgaatctacacagcaaaaccattttgcatctcccagtcctcatggtttcacatggaaatcatcaggatctaattagtgactcagagaaagaaagcaataatagagtgccgtggcgcgcctgcaaaatttataggtcactaaaagtcacccatagcaacaaggcttcttgtctcaggtctgcagtgtgtcacatgccagactcctcagactcaacaggcagctctgcacatccacaatcaaggagcttgttttccacacttcatggagacttccctcttgtctagtttgacttcctctccatttttagcatcagaaacacaaggaaataaaattcgtggttagattgatgtttcttccccctgctctttcatctcctgctatgccaggaagtagcattaaagttctatcatgcggttgcccaacaggacacaggaacccaggaccttccaacctgatgactagtgagtgcaatacagagagctggagctgaggcttaattacacaggaaggagtagcactgaagtaagatcaggttgctgaatcacgaaggaggacattttgcaacatatagatgatatatatacactcacatttaaaagcattttttctttaccatgacaaaccactcgacaacaggaacataaaaatggagatctaagatgggaaaggggagatctgttctctctgctcttttccacacccttctatatcgaaagaattccccattttccccattatcaacacaaatctgaaaccatttggtaaatattaagacaagcattaaatctgaaggcactaagatctggggagaaaaaacacatacaagaaattaaattaatttgtgacaccacaaatccacacagaatccaatggttatatgaaacgggcattattccttaagacatagattttcatatttgataataatgacatttgcaaaatcctaatagatttcttcaaaatgtctgtgagctcttaagagtttctgaagtcaaggtcaatcgaggcagtgaaatagaaaatctgaagatttttcagccagggatggtggctcgcacctgtaatctcagcattttgggaggcagagacaggaggatcacctgagatcaggagttagagaccagcctggtcaacatggcgaaaccccatctctactgaaaatacaaaaattagccaggcatagtggcatgtgcctgaagtcccagttacttgggactcagaaggctgaggccggagaatgcctgaacccacgaggtagaggttgcagtgagccaagatcgcaccactgcactccagcctgggcgacagagcaaggctctgtctcaaaaaaataaatgaaacactgaagatttttaaatagtaacttgtattattcataaaataaataattttatattaatgtacattaacttatgaaaatgcaggagacttaaaatcataactttcaagatgacctaaaatgcaaaccacacaaactaaaactataacttaatgtggcattaagtcagaatggccagaagtcacagtaactatgaagtgatatgaaatcaacccgtttcttctaacatattcttcattcaatattgctgaagagcaagaccatgcaatcaaaaaatcaaatgttacagaaagaaatgatacatgctgcaacaacacacatggtcttcaaaagagaaaaaaacagataaaagcatttatcatttttagagtctggcacaagagatgcaaaacggaaaacaaaacagccatgacattcagcaagtatatacgaccagatttaaaggcactgtttattgctcgattcagttgtaaagctaataaataaatggttcaagctccatttaaaaccagagatacagttgcatttttagctttcaatctcaagcagtcagacccagctaaatattaattattaccactgcaaggggaatgctagacctctataaagtccaccttaaggtgaacattaaccaagatggtgttttacatggattaactggattactttaaactgcaggctattataagacatactagacaatatttaattgtacacagcacaaaatcacaaataccaataaacagctatcctcagtaagagctagcctgactgaccacacttaccgttttccacatagggatgaaaggggaggacaagggcaaggatgaccctgcctctagttggctccaagacacttctgatatcttttaacaaagtcaggggctgatcacagcggtccagcaagttcaggcagctgatgacatcatactggaaccccgtattctgccattcatttataccaaggactctagaaaaatcagaaataactgtattaacataaagtccctctaaagacatctttaaaaataactgagatgacaataaaggctttaactttgtcttctaaattaagttcaaaatcttctgttataatttatgtttgcaataatgacatggccaaggaagagaaaaatagcaaccattttttttttttttaaattttttcttttttgagacacagcctcactctgttgcccaggctggagtacagtagagcaatctcggctcactgcaacctctgcctcccaggttcaagtgattctcctgcctccgcctccccagtaactgagattacaggcagttgccaccatgcccggctaatttttgtgtttttagtagagacggggttttaccacattggctaagctgatcttgaactcctcacctcaagcgatccgactgcctcggcctcccaaagtgctgggattacaggtgtgagctaccacgactggcccatatttctttaaatttagcatttcacctatttccaaatctcaacacatacgaagtttcctttacaagaactaatcatgtttaataagtatgaagatgtaacctgacaaagttatgaaactaaaacatcaaattcttttgaatatcagttaatgaacaagagtccagctttttaccattcattggaacttaatcaaaaaatgcatcatataattaatgttttctattcctaggatcccttctattcttaaaaatggctgggagtggtataaaataatttccattgataacttatgacctttgagcacatttccgttcccaggaaagacatatttcatacttgagaatcttcatatctgaataactatacagaaaaggaccgggcacggtggctcacgcctgtaatcctagcactttgggaggccaaggcaggcggatcatgaggtcaggagattgagaccatccaggccaacatggtgaaacactgtctctactaaaaatacaaaaattagctgggtgtggtggcgcgtgcctgtaatcccagctacccgggaggctgaggtaggagaatcgcttgaatcagggaggcggaggctgcagtgagccgagatcacatcactgcactccagcctgaggacagagccagactccatctcaaaacaaaacaaaacaaaacaaaaactatacagaaaagataaagcccaggacatcctattaacattaagagcatggtttaaaaaaaaaccactctcgatcctcaatctctcactttcatacacacgtacacagaacacagagaacattttcagtcctctacaatgttgttatctctagaaagggggagtttttatatcaagagtctttgttagccacacaattaggcaattttacaaattacttactcctgcttggttataccaatcagaatgtggtaggtgagatatgttatgatagagacaggtaaaaaaggaaacataaaaaaaggatctttggtaaacaagtctttagtaatgttgagcagatacagtaagatagctcagaaaattctaaaagtataatgagggttgttttgaaaacctcattagcataatgatatttagagcatttctgaatagcagaattttaaaaacacaaagcacttagctgcattttcttttcaatctatatttttgtcaaactaaagcctcttccaaatagcagcctaacaaacttccagggactagtcagattccttactggtgcaggtgtttcattgcactaaatactgtttgaaataagtagagcattcaggctttaaaatcactttgttgtactaagtcaactgtaatagcaattttggaaattcaatttagctcattccaagagtttccaaacattactaagaagactactttcagaacaaaaatgtcatcaattcccattctaaaaaatggaaatgaataaagaaaggactatttgtatatattaacgccttagctaagcagccaatttaaagacacaaattgtaaaacacaaattatatatttgatttttaaaaacaaaacaacaaaaaaaatctgatgtctatctgcaatgaagcagaagccaaacatcatcagcatgttctaatctagaataatctcactaaacctacctcagaatgagtttcagataggtagcctctgtgttggtaattttggaagagaaatatatgctcataacacaaaaaggtgactaacactaagacagttaaatctatacctatagaagctcaagtgcattcttacttctgttttgtgatttttatttgtaaactcactcagttccactgatgaagacaaattgcttagccccactaaaactgcgtattagcccaggaatcctaacaagttgtcagaattttcctttttctaaaacagtatttctaaacctagaatgagggtatctattcaagtgattattattttcaagaaaatgagttaatacttccagaaggatgtaaaatatatttctccttagagaatgataaagcagtcaggtgcagtagctaacatctgtaattccagcactttgggaggatcgcttgagcctaggagtttgagaccagctggggcaacacaacaagaccccatctctataaaaaattaaaaatagccaaggatggtggcacacacctgtagtcctagctaagctacttgggcagctgaggcaggaggatggcttgaacacaagagtttgaggttacagtgagctatgattgtgtcactgcactccagcctggacgacaaagcaagatcctgtctcaaaaaaaaaaaaaaaaaaaaaaaaaaaaaaaaaaaaaaaaaaggccaggcatggtggctcacacctataatcctagcactttgggaggccaaagcgggcagattgcctgagctcaggagttcaagaccagctgggcaacacagtgaaaccccatctctactaaaatacaaaaacttagctgggcgtggcagcatgcgcctgtagtcccagctactcgggaggctgaggcggaggctgcacagtaagccgagatggcaccactgcactccagcctgggcaacagggagagattccgtctcccaaaaaaaaagatgccttgccatctcgggttgggagagctctaaacttaggaaataagcaatctgtattttgataattcctaaataaaaaatgaaacactaacaatataaagaaaactgtcttgctgtaaaaatcaaaaccacatcctttagttttacaattgggttttctggcataaacaatgacaacttgcgaatacaaaggaaaaacctggccattttctgtttattgacctatttttgaaatgcagaaactttggctgggcgcagtgactcacacctataatcccagcactttgggaggccaaggcgggcggattgcctgagttcaggagttcgagaccagcctgggcaacacagtgaaaccttatctctgctaaaatacaaaaaatttagctgggtgtggcggcatgcgcctgtaatcccagctacttgggaggctgaggcaggctaatcacttgaacctgggaggtagaggttgcagtgagctgagattgtgccactgcactccagcctggtgatggagcgagactttgtctcaaaaaaaaaaaaaattacagaacctttatttaaaaaggtgtgttttgctcatgcctgtaatctcagcactctgggaagccaaggcaggaggactgtttgaggccaggagttcaagactggcctggtcaacataatgaaactcctgtctctacacacacaacacacaaaaacacacacacacacacacacacacactctctctctcaaattagccagatatggtagcaggcacctgtagtcccagctactgaggaggctgaggtgagaggatcacttgagcccagaagttcaaggctacagtgagctataatcacgccacatgctctagcccaggtgacagagagagacccgtctctaaaaatatatatatataaattaataaaaagcctgtttttcatggcccagatattgaagagaaatagaaaatagctctaatctcaaaaggaagaaaaaaatgtaaaattcagctgaaagtctgccttgccatcttggattgggtgacctctaatcttaggaaataaagatactacttcctcattaaaacctcaaactgcaccaatagtcacaaaatttaccacttttgtgaaaatgttttcacttcatactaatattatgaaaggaatgccaatcagtatgaatttcccatgcaggtcaaactgcagatttttggcttatgtgctgtatattagggaaaaaattaaaccaagtattttttatgtggtagatatctttacataccatgtacactccagatatattactaatttcaaacatctgaagtttccctgaaaattccatttaggcacttagcatcaaagcaaaagaaggctggggcggtcaatcatctgaagatgggtttaacaccttcctcttcgacccacttcaaagcatggatttttttaagggggggaggtggaatcagattaggaattcagcctgacttaagccactgttataacaaaggtcaaagcattctaagttttgaaatgccgaattaatctctaactgaaggaaaacatgtcaattatcaccatgcagacccaccagaaccttatctgagacagcttgctaaagctaaggggctttcaaatcactcagttcaaactcacaccttccttatgtctcttcctataacaaccctaacagcaatttaaacactgacagtgataaggacttaaacagttcaagctaggaaggtcgatctccctaagctgtaactcaacttctaaggcgtagctgtgcctgattacaccagagactatacctattcctttccttccatataaaaatcccacagcgtatctgttcacagaaatcttcccttctccaggctaaaaatctccatgttttgcaaatgctcaaaccagtcctgctccaaaagctacactgatgctctatctctaggattaatctgtaaaagtagaaacatgtggataggaaagtgagtgattacataatttcttctcctttctttctaaggctaaccagacttccaaaaatatcacagagaaaggctgactccagctctacctccctgattctgcactgagccaatatatagaaatctcccaatcaataaatcatactgaaataagaatacccttcttccagccgggtgcagtggctcacgcctgtaatcccaacactttgggaggccaaggcaggcagatcacgaggtcagcagtttgagaccagcctggccaacatagtgaaaccctgtctctactaaaaatacaaaaaaaaaaaaaaaaaaaaaaaattagccgggcatagtggcatgtgcctgtagtcccagctactcaggaggctgaggcagtagaattgcctgaatccaggaggtggaggtttcagtgagctgagatcacgccaccgcactccagcttgggcaagtgaaacttcatctccagaaaaaaaaaaaggcccttcttcctagtctttcaaactccagatgaccttaaaaccaagattcacactgatgactataaactaaaagcaaaacaaaacagaaaatagcaagtattgtcaaggagtggagaaactgaaacccttgtactacattgctggtgggaatgtaaaatggtgcagcagcaatggaaaagtattgcaattcctcaaaaaattaaacccagacttagccatgtgatccagcaactccacttctgggtctatacccaaaagaagtaaaagtaggggctcaagtcggtatctgtacacccatgttcatagcagcattattcacaacagccaaatggtagaaacaacccaaatatctactgacagataaatgggtaaacaaaatgtggtacatgcatacagcgaattatcattcatccttaaagaaaattttgggccaggcgcagtggctcacacctgtaatcccagcactttggattacttgaggtcaggagttcgagaccagcctggccaaatagtgaaaccctatccctactaaaactacaaaaaaattagccaggcatggtggcatatgcctgtaatcccagctacttgggaggctgaggcaggagaattgcttgaacctgagaggtagaggttgtagtgagccgagatcgtgccactgcactccagcctgggtgacagagcaagactccatctcaaaaaaaaaaagaaaagaaaagaaaagaaaattttggcccatggtacaacatgagtaaaccttgaagacattatgctacatgcgataagccagtcacaaggagctaatgtatataattcctcttatacgaaatacccagaatagtcaaattcatagacaaagtagaatggtggttgtcaggggttacgaggagggaaaaatggggagttattgtttattgggtacagagtttccgtttcggaagacaaaaatttctggagatgaatagtggtgatgattatgcaacaatgtaaatgtacttaataccactgaactgtacacttaaaaatagttacaacagtaaattctatgctatgtgtattttaccactacttaaaaaaattttttttgagaatgccacattctgattagggaagaagtcccttcttctgatctgccttttccaagttgtctctcgctagtgcttttcttacctatagtgccaacccctccgctccagaaaaatactgctaccagaagattatttctctacatttccagttaattatgtatgagatgattttttaaatttctaatcatggaagatcattttttattcatatcctttaaataatatactttcaagaagaaatgcatctaaaaccaagaaaattatacctgtatttctttttctgaagctgccatatcatagtttcagaaagctcagtggcatagatttcttcaaaatgagggctcatgatttttgtgacttctccatctccagcacctaaatcaagaagtctgtgggttttccagtctggattaattttaagcagtctctgaaactgatctggtgaaaacacaaacattgagcctcttcctagcaacctgaaagaaaaaaaggacaaaaatggaagtgtctatgcaaattaagcacccctcacatacacacacaaagtgaatatagtgactcagcaccaacaaccataatcacttattacatggttaagattttttttttttttagacaaggtctcactctgtcactcaggctggagtgcagtggcatgatctcggctcactgcaaccttcgcctcctgggttcaagcgattctcctgtcccagcctcctgagtagctgggattacaggcatgcaccaccacacccggcttattttttgtatttttagtggagacagggtttcaccatgtcggccaggttggtctcgaactcctgacctcaggtgatctacccgcctcggcctcccaaagtgctgggattacaggcatgggccactgcgcctggcctaatttttttttttctttttttttttgagacagagtctcgctctgccgtcgcccagactggagtgcagtggcacgatctctgctcactgcaagctccgcctcccaggttcatgccattctcctgcctcagcctcctgagtagctgggactacaggcgcccgccaccacacctgactaattttttggatttttagtagagaaggggtttcaccatgttagccaggatggtctcgatctcctgccctcgtgatccacccgcctctgcctccaaagtgctgggattacaggcatgagccaccgtgcccagcaaagatattatcttttatgtcatttctatgattagaagacaaagttaataaaataagaaaatgcctccagataccatttgtctttggagttgcaaataatgccccaaaaaagcatgggaggagggaaataaaaggtggaaagtggaaaggatgacaggggaaggaagaagaaataagtaagagatgaatgtgaagaacttaagtcaaaataggaaggaaaagtggaaggagtaacagaaaacatgtttatcagttgaaaaagatgacaagctaacacagccagaccacagtagcagagaaaccaaataggaaaaaaaagtgatttcaaatatggaactaaaccatggatcaggaaaaaagagctttagtataacagatttttaagagacactagagaaaagagggaaaagagtggtccttgtgatgtcggttaatatgcattaaagtagattcgtacttatgtcagtttatatggttacaactgtctgggtcctattatttctaaaggtcctagaaaacactcaaaaccatagtgatgcctttgaaaaaagagactgaggggagtttaactggagattgaagagaaccctcagaaaagcaactataggtccagccaagtctcatggaagcatcactctgggaaataaagcgcaatccctatttaggacttgttttctagctctgaaattctagtttatctaggacagggattctcaaccctcctttaagcagcagaaccctttctttaaatgaagtggaactcacagataacataagatcctaagagagctgctgctgttcgaatgaggttgggagcccaggagctgtggccagcccacttctaggcctttctctgcagcctgaagcagttcctgaggcacttcctcctcagaccctagaaaacagtttggggaccactggtccaggaagtggcagggaaacctgttctgtactgctgctctctggaaacaatcataaggtacagaatgtttgctgctatacagtgactggaaagatgcatgcaacacggtgcccaaggtaagaccagttttaggaaaaaatacaaataatggagttcatgtaacaaagtcccccttccttttcccattaaggccataggagagtttaaccaagtttacagtaaatcttctgcccccatagaaatgctaaaaatttggagaaagacctcagagaccactaaacgtgatgctaccgactacaactgcttaccaaagaaaatcacgtctcataaaagacaagttgttttaatcctcaattgttcatatattacagtaagaaaataagcaaatctgaacttgctgaagtagctgtacaaaatttaacacagaaaccagtcacagcagaaagaggctactggcagcatggctgaggggaggcgaatttcaaatactgatgctgacttgccacaggaccaaaagtaagtcacaaaatagttattttgcttaaattttcccagagcgtgcttcccaagccatctccttgggatgtgaggaatcttgacatgataattataaaattctagaacaagaggtcacctgagctcagagctcacaagttcatctgactggtctacatttataggcactagaggctgggcatggtggctcacatctgtaatcccagcattttgggaggccgaggtgggaggatctcttgaaaccaggtgtttgagaccagctgggcaacatggtgaaaccccgtctctataaaaaatacaaaaattagccaggcacggtggcatgagcctctagtcccagctacctgggagactgaggcaggaggactgcctgagcctgaggaggtcaaggctgcagtgagccatgattgtgacactgcactccagcctaggcaacagagcgagaccctgtctccaaaaaagaaagaaagaaggcactagagaaagaggggaagcattgtcctatttcgaaagaacattagcaacaggggctctacaaaaagattaacactgtcaaaaaataaatcaaaatccatcaagcccagtgtttatcaaccaggattgattttgccctctagggggcaatgggagtagacaggagagtttccagtaatcacaaggacctgggggtactactgccatttagtgggcaaggccagaaaagttagacttcctgcagtgtggggggcagtctcgcacaatgaaaaacagtatcacctaaaatactgagcccaatacaaagtttcccataaacacaaaccatgaagagatatgaccctctaatttgggtttaactttagtgtttaataaccatcctaggttctctgatcacaatctaagttctctctagacttaagagtctacggagagatgcacctcttccttataaaataaactctggaacatctactaagtctttccttacttggccttctcctttccaaaataaaggaagtttgataagtatcctaaggtaatacaagacagtactacagtaatgatttctgtgagagatggccacctgtagtaattatctcccactgccatgaccggaaagtactgatgggccctaaaatttagtttttagctgagaatgggacacaaggcaagaaggactgaaagcagggtgggtatcagaaggaaaaagcagaagagttttaagtaagggaagccaaaaggggtttattaactgcattgcctctttgatcaaactgtgaaattctagagcacggaattttaaccagggtcttatgggtagaggaaaggggaaataaaagtttgaagcccccaaaatcatacacaaaatgttgaatgtaagcactttttgaagagaggattcctacctttatcactttcaaagagctacaggaccccagaaaggataagaatctctgctacagtgactcatctgaattccaaaggaagaataaatggtatagaacagaaattcaatataaccaatttaaggaacaaaatgtcagaccaagttgtatcaactcaaccacccatataaaaataacaactgtttgccaaagcaaacgtatggcaatttcacataaacaatgaagaaaatcaactgagaaatcttgagaaatggcttgcggtgcctgaagacttaggaccagatgatacactggggatccagtcagtcagtagaaactgctccaaacctcaagggaaaagaaaagtgggcccaaccagtggtttgagtggtccaatgaggcttcttaaccattgagcctgttgcttttctctttggcattttagattctaggtccttaggaatgcttgaaaacatggccaagaaaggattgaaaaaaaaaaaaacaaaaaaaactcctaaagctttttctatggatttatatgagggaaccactctggggacagagaattccacaataagttcataaaattctggtgaacctagacattatttaagaacagatgcaggactcttcactcaaaataagccatcatccactgttgggctgactaattatatctcccaaaaaaaatttgccactgcgaagtatgtttaaggcaaagatattacttttcagcctaagggcgtaaagccctcagcttcagggcttggttccaggagtcttgctactttgtggtccagaaccagcagcattcagcatcactggcatcgtctaagagcttgttaaaaatgcagactctccaggtgcagtggctcccacccataatcccagcactttgggaggcaaaggtggatggatcacttgaggtcagttagagaccagcctggccaacatagaaacctcgtctctactaaaaatacaaaaattagacaggtgtggtggtgcacacctgtaatcccagctacttgggaggctgaggcatgagaattacttaaacccgggaggcggaggctgcagtgagcccagattgccactgcactccagtctgggaaacagagcaggactgtctttaaaaaaaaaaaaaaaaaaaagcagactctcagacctagcccctgatgtactaactcataatctgcattttaacaagacccccaggtgattcctatgtacatcaaagccaagaagcactaccgtaagtaactcccgctatgaataaacatactaatgaggctgtcacgttatggtgaatttaaagggcagaaccacagaaagatagaacgctggaccaactgccaaggttctgactagtagaagtattgtagctcaggtagtcaacatgctgaacaagataacttttctttttgtgtttttccttttgtaaacctaaggataaagaaaaaaataaatgtccaagattcacttacccattgatagatgttctagacataaacaggctaaaaacagatgacacaaaagaatgatataattggataaatagccagcccgatttctcaatgctgttgtttaagaagatctgtgttccttgatcaaggtaactctgaacaaagacagcctggagtgattcgcataatttctctctgttgcacacataccactaaaa

SEQ ID NO: 1237 - DNA, 1528 bp, Homo sapiens
gaaactttttattgtaaaccctctagtaagttgcttgaagtatttttttttaattactgaattactttttaataaaaattacaattttgaaaaattaaacatcattaaatttttatttttacaatataattatccttctcttgacttcatatctttccttctttggggggtgcttaaaataattctcactagattcaataacccctagccaaaactgggtcagtaaaccaaataaactgaaattagaatggtatttttttcattttttttccaaatagcaaaactgctgtggttcaacttcaagccatttaccaaaacaattacctaagtaatcatttcacctacaactacttttagttaaaaaaaaacaaattaagccaagtatgcaaagcacactcagatatcctccaacagtccagcattcatgaatctacacagcaaaaccattttgcatctcccagtcctcatggtttcacatggaaatcatcaggatctaattagtgactcagagaaagaaagcaataatagagtgccgtggcgcgcctgcaaaatttataggtcactaaaagtcacccatagcaacaaggcttcttgtctcaggtctgcagtgtgtcacatgccagactcctcagactcaacaggcagctctgcacatccacaatcaaggagcttgttttccacacttcatggagacttccctcttgtctagtttgacttcctctccatttttagcatcagaaacacaaggaaataaaattcgtggttagattgatgtttcttccccctgctctttcatctcctgctatgccaggaagtagcattaaagttctatcatgcggttgcccaacaggacacaggaacccaggaccttccaacctgatgactagtgagtgcaatacagagagctggagctgaggcttaattacacaggaaggagtagcactgaagtaagatcaggttgctgaatcacgaaggaggacattttgcaacatatagatgatatatatacactcacatttaaaagcattttttctttaccatgacaaaccactcgacaacaggaacataaaaatggagatctaagatgggaaaggggagatctgttctctctgctcttttccacacccttctatatcgaaagaattccccattttccccattatcaacacaaatctgaaaccatttggtaaatattaagacaagcattaaatctgaaggcactaagatctggggagaaaaaacacatacaagaaattaaattaatttgtgacaccacaaatccacacagaatccaatggttatatgaaacgggcattattccttaagacatagattttcatatttgataataatgacatttgcaaaatcctaatagatttcttcaaaatgtctgtgagctcttaagagtttctgaagtcaaggtcaatcgaggcagtgaaatagaaaatctgaagatttttcagccagggatggtggctcgcacctgtaatctcagcattttgggaggcagagacaggaggatcacctg

SEQ ID NO: 1238 - DNA, 1528 bp, Homo sapiens; identical to SEQ ID NO: 1237

SEQ ID NO: 1239 - DNA, 399 bp, Homo sapiens
attccaagagttcaagaccagcctggacaacgccgccagacgccctctctaccaaaaaaatacaaaagttagatgggtgtggtggtatgcacctgtagtcccagctactcaggaggctgaggtgggagaatagcttgagcccaggaggtcaaggctgcagtgagctgtgacagcaccactgcactcccgtctgggcaacagagcaagtccctttcagaaaagaaagaaaaagaaagaaagaaaaaaaagtgggggaggacaggggagggtgttttgtttttaaacattactaagcaaattgctatctagagacctcctctagtaaagttatacatctagtggtgtgctggtaaatgtgtaactaccagcttggagaagaaaatggctatttgcagtgtt

SEQ ID NO: 1240 - DNA, 289 bp, Homo sapiens
caatctcaagcagtcagacccagctaaatattaattattaccactgcaaggggaatgctagacctctataaagtccaccttaaggtgaacattaaccaagatggtgttttacatggattaactggattactttaaactgcaggctattataagacatactagacaatatttaattgtacacagcacaaaatcacaaataccaataaacagctatcctcagtaagagctagcctgactgaccacacttaccgttttccacatagggatgaaaggggaggacaagggcaag

SEQ ID NO: 1241 - DNA, 289 bp, Homo sapiens; identical to SEQ ID NO: 1240

SEQ ID NO: 1242 - DNA, 399 bp, Homo sapiens; identical to SEQ ID NO: 1239

SEQ ID NO: 1243 - DNA, 476 bp, Homo sapiens
ggagcagcaagggcccccacagtggtgtggcacgtcatccgagtccacacagggcaggcagagccagagatgcccagtgccagcctcaggtgtgaagccagaaagacctgctgaagcacgtggctgcaagcctgagagagcgaagcccagggaccctgagtcagttcacacacgagggctcgtgcgcaaggtccttgtcaaatgccacctacacctggggccaccctcattgaaatgtcactcccagcccctcaattcccacttgctagttgcctactctactgtatattctagtttcttgtttattgtctgtttccccctaatgtaagctccctgagggcaggaaagatgtctgctctgttgtctgccccagtgccagccctcagtgctaagcgaataagggcaagtcagtcagtgggaaactgctggcaccgggcaggccctgcctgagtgccatctgtcctttttattgttgt

SEQ ID NO: 1244 - DNA, 760 bp, Homo sapiens
gcacgagggagcagcaagtgcagagtctctgtggtcagagcacacagggctggggctgaggggtgggcagttaacaggacatgcccaggagattgcaggagctagacttgcagagcctttggcccttgtgcacactagaattgtgctctgagcaagggtctgagcacgggccgggcgtaagctaagccccttcaccaggatcgctctagatgctgtgttaaccatagcagggccaggtggaggcaggggaccagtctggaattggaggctggctcctggccaggatgatcgtggacaggatgcgtagcctccctgttgatggttcttcccaggtttttatattcagtgctcacacatctctgagcacataaataagcacttctctgcaatggattcctggaggtgggaagagtatgcagattataaatgttgctgggaactcaaatttctctccagaaataccctattactacaccaccacacacaagagccactcttctccacctgagcaacgctgagtgtgatcagtcctgttaatttttggcaacctgatgggcaagataacctcgtcctttgcattttcctgatgctaatgaggttgagcctctttctacaagttcacaaatcttttggtgtctctctttgtgggaatggcctaggcagtcttcttgcttagtctctctgttcccaaaaggtattaccattcatctttcattgaatttgctagaactgccattaaatgtaaaataaagaaaaaaga

SEQ ID NO: 1245 - DNA, 3178 bp, Homo sapiens
tatcagtcccctcctcttgcacttggaagacgatgacttttctgagaatgaaaaacaacttgcagaaccagcctctgagccagatgtccttaagattgttattgactctgaaataaaggattccctcctttccaacaagaaagctattgatggagggaagaatacttctggcctccctgcagagcccgaaagtgtgtcctcaccccccaccctacacatgaagactggcttggagaacagcaacagcacagacactttgtggaggcctatgccaaagttggcccctctaggtttaaaagtagctaatccttccagtgatgcagatggtcagagtctcaaggtgatgccttgtttggcacctatagctgccaaagttgggtcagttggacacaaaatgaacttaacagggaatgaccaggaaggccgggaaagcaaggtgatgcctacattggcacctgttgtggctaaattgggcaactcgggggcctcaccaagttctgcagggaaatgaacttacttgtccttaagcagaagccaggctgtgaggggaaattgatctcacctcctttctctgcaggcatctgtttgtttgtgtcttagaacttggatccttgacttcaatgatgcagtggataatgatgggagaaagggggtagggtgctgaccctggtataagaagtactctgaaattctgatcatgttaaaatgtgttacctcacttgtggtgctgggtcccctcatcctctctaagaagatgtgatccattactgaacatgaggtgcccctcttacccaaggaatttataacatgactctggctccacagtggtttctagttcttcccccacaagcgaaagagctgtttgcaactttggagttgctgtagactgaactgtagcttgtagctgttgaattaagtccaaaatctaaggaatgcgatggacttgtgcaaagggatccagaagagacactttttagttgatgtttcaagaatagggagagagaggatgggtaccatggaataccaaagtgaaggactttgtgtcattcagtaaaattttcttttttcatatcctaagtagctcccattccctcaccttttcaatcagaattaacaaattcaagccttcagtaaagtagggatgcttttaacttttattattaattattttgagatcttaaaaaaatagtagttctcccttattatttttgtgggcattgaaaagctcatttcacagtaccagagatttttactgggagtatatattttggaggtaggcatagagggagccctaccccttccacaaattacgttactcaagagacagctaaaataaaatgcattatctcctcagaccagagacagtggccaaaataaaaaatcatggggctggaaatttcccaaatcaaaccagcctcctggtgcttgaaggtttcattcactattacctgcacaggatgtaaagaaaagtcacagtaggcactctttaccagggaaataaggcagtatttgaatcacaagatatattttttatctgcaaccatggatccaatgatctgtagagctttttcactcattaactgtcaggatatgaaggactgacagtctgtaaagatatttatatttttgtatagttgttttcatagatttctcaaaggctgaagttttcaacctagaagatgagatttgtattgagtatagaaatgatgtttcctatctagtttgtaaataatcatggtgcacttgaggggtctcttggaaactcctagggggtcaagaatcactattctgaaactgtatagactgggatttagctgctgcattttgcctttcttaaataattatattttggaatggtaacccctgttctgtcttcattgacaggatttgcttgtgttgttaaaacactaacacaagagcttccagtgcctgggccgtgcctaggtgatgctatttcttctatatctcctgtcttctttatcccaaatcccactcagcatatcttcagacctaggttgtaagaccaactttggattggatctagccagtgaattattatttccatggttggttccctttctgttaactctggtaatcaacagattgaaagcggtggaagaacttcttctgaaaattgcagtgggagcaaattcttgttggttttgtgctgcttgcctttctagatctgctcatcagcacttaaccttccctcctctaaaggttactaaagaagcctgaagtaggtaaagagtgctcctcagcttcttatccttccactctttacccagcagatttcattcaatgccttagccaaggagtccagcacctgtctcccctgctaataattgtccttagagatgctagtactttaatccaggtatagcagtttcccgttattttcttgcttgtcgttcccctacatttcctcctgatttcccaagactctctttgtggcttttgagggtcagccaaggagcaggcaagtgagtgaacaatcctcaggaaaagaaggaccattttagcttaacacttccttttttttttttttttttttaagaagaatataggtaaacaggtaatgattcttgattggagataccatttgactcttgatgagagttgtacgaagatggaaatgagggatgattccaggcgttttagggggaaggctgcagataccattctaacccccaagatactgtgttctcaagacctcttagaactaggtgttgtcagggataatttgaggagggcttagtcttcagaacaatcctgcagtcttgacagaaatctaaaatctccaaaaactcctaccctttaaccttaccctagggggaactgatctatgaatattacatgtgtgattatgaaaggtgaagttgagtgagaggagttgaggaacgtggaagacagtgagctctcaccctaacactataagaagcatgatctcaatagaccaataattcacctttttatacatctgtaaataaatggaatgtttttaagaatataattatgtcagatttagcattttcttttatatattaaatatatatatctttccttttctgctttcgaaaagtgactatttttttagaaatctaagaacagaagtttggtgattgaaaggtagaatatataaacctgaaataaagcagttaaaacaattaaagcagaa

SEQ ID NO: 1246 - DNA, 309 bp, Homo sapiens
gtcaggaatgaagataattccttagaggataagggtagaatctcttccagaggaaacagagatggcagagtgacgttgggtccaacgcaggtttttctggcaaacaaagattctggttatccacaaatagttgacgtttccaatatgcagaaagcacaagagttcttacctaaaaagatttctggtgatatgagagggattcagtataaatggaaagagagtgaatcaagaggggagagagtgaagtcaaaggattcttcatttcataaattaaagatgaaagatctcaaggactcaagcatagagatg

SEQ ID NO: 1247 - DNA, 276 bp, Homo sapiens
acatatttgagagaggtgccactgaagtggttttatcataggaatcctttccttttctctaagtttctgatatgccatttgggggaggttttcgatgttctaatccttgtagcatgttttacatggaggcttcaaaattgtgtgcaacctgatggcaagtatttgttttagaagtcattctaaaatcattctggtgtcagtatgagcaaggcagttcacctgttaaccttggggagtaaaggtacacaaacacagtcttttagtggtaaaggacag

SEQ ID NO: 1248 - DNA, 474 bp, Homo sapiens
cacaattacccttgaaccagaagacaatgaatgatttgctaaacagatggcatagtctatgacatgcatcatatgtgtgagcaatcacagaaggtatgacttttctcatgaaatattttcagacaaatattttaagttaatctaacattcactaaatctacctactgattttaggtagattttctttctccaaatatacatttttaaataaaaattttcattgtattgcattgtattttattggttatcaacagcaccatgttcttagtttttttaaaaaaaatgtttaatgagttgtaatatttgtgtctttaagcaaggggttccctcatttttcctgtcttttctggcttgatttgaagttattcctgggtatcaatattctacacacattgtctactgcttacctccaacacagcagttttcactgtcatgtaattatttgtttgctcatcgctcttccccatgaccatc

SEQ ID NO: 1249 - DNA, 320 bp, Homo sapiens
gtgtcaaagtacgtggaaaactgaagctttaagcaaaagatggcttgggtatatatttaacctagcttctgttgaagcatcactagtctgcaaataccacatttctctagtgaccatcttcatgtctctgagccttaaagaatactggttaaaacactaacagatattatgtttctgaatatgtgctttatttgctagttatcctatttctaatgacatattcagtagatttgtttatgttgtaaaatgaagtgctatcaatttattgttatcatgaacagtcagaataaatattgaaacctcttatttgggcaaaaaca

SEQ ID NO: 1250 - DNA, 143 bp, Homo sapiens
cccagcactttgggaggctgaggtgggtggatcacgaggtcaagagatcaagaccatcctggccaacatggtgaaacctggtctctactaaaaatacaaaaattagctgggcatggtggtgcgtgcctgtagtcccagctact

SEQ ID NO: 1251 - DNA, 957 bp, Homo sapiens
gtggatttgagattttgttggattttggaatatttgtattatacctactgtttgaacatcccaagtttgaaaatctgaaaccttaagtgttaacatgagcaccttaataaagtttggacagtatttcttttataaacaatattattgatattgctaactattaacattagaaatgaaagtcgagaaagataattacctggaacgttagtacccagaaatacccaattgtgttggtatttgttttaagttttcatttttatgcatctccacctcagaaccataatctaaatttacagttgaattcatttcaatacctcagtggtgtaccattgagtcctaaaattctagaatgttaatcccagtcatgtgtgtacactaacatgccttttttgaagtcttttgaaacctatcagatacagtgtggagtccattttgctgaagagtatctagaatatctgctaccctaagaagcagtcatagtcccttccatagtagtttaagttttaaattgtccactgttctgagtaacgtgatgaaattttgcaccaccctgtcctggatatgaatcaacataaccacgctgtacgtgctcccattggtcagtcattgacatcatcggcttttgacatccatctgtggacatcagcatgactcagtgattcaggatcaccctaagatgatcccccttcttaggtatagtcagaaggttgatattagctacatcagaattcctaagtcattcactttatcttatcttataagcgttttatcatctcacttcaacacaagaagggtgagcacggtactatgagatattttgagaatgagcgagaccatgttcacataacttttgtatggtatattgttccgttttcttattggttattgctgttcatttgttactgtgccagatttataaattaaacttgattataggtatatacctataggaaaaaa

SEQ ID NO: 1252 - DNA, 155 bp, Homo sapiens
ttttttgtatttttagtggagacagggtttcaccatgttagccagggtggtctcgatctcctgacctcatgatccgcccatctcggcctcccaaagtgctgggattacaggcgtgagccactgcgcccggtctttttttttttttttttttttga

SEQ ID NO: 1253 - DNA, 967 bp, Homo sapiens
tgcctggtaaagcaatttattcaaagcccacggccaaaaatcaccctagccctgcctctgcctcagttatttccacacctacccccctgctttgtagctaccccaaggtggcggtagctcaaagtcccctgagggctggggaggaagctacccggcctggctcgcattccaggccccactgtaggccaaaggcatattttaagaggacaatggatttgtttttattaatttttttgctaagaaagtttctaggtggcaggtgctgtccggggagggggcgtgcgcagcagacacagcagccaaactgtcctttctgcttccgtctgtctgtgccagccctgccgcctgccagctcttgctccctcagagccagaaggttcttggctccaggcttcctggcctggatgctggcagcccctggggagaggacccaggccccctctagtaatggccaccaccctccccccagggcagctggagcctcatctttggcagggtcccctctcccttttccaggagactctgtgcctgtagccctggtcccagtgaacctggcccccaccccagtggctggaacaggaaggccaggaggcagatgggccagggccaggagacagatggcccaatcccctgcccaccacagcagcttttctgagaggcgggcaggggcagggtttgctccccctggtgctgggatgtggtagagacattgcagccagggctggaggcagggaggcgggagtagagatgtcgctgctgagcccccatcaccatgggaggcaggggaggtctgcactctgggcactccgcatgctggggctccccaagtgttaggccaggctggagggccgcgatgtggcggggaagccccagaccctacaggaaagcccttgcaagtccgcaccggggacccagccccaccgcaaacctctacggctacggtgccggccgcaaggcatgctgggag

SEQ ID NO: 1254 - DNA, 1542 bp, Homo sapiens
aggccgtgttccacatgcagtcggtgaaatgccttaagtgtcaggaacagaagcgggcagtgctgccgtgccaacacgctgcgctgtgtgagctctgcgctgagggcagcgagtgccccatctgccagcctggccgggcccacaccctccagtcgtgaccctgcaggcactggccagcctggcccagatcttctcacctaggactttttaaagtatatatatatatatgaatatatatatatatgtgtatgtatgtatgtatatgtatatgattatgtatatgtatacatttccgtatgtatgtatatgtatacatttccgtatgtgtgcaggtatgcgtggtggtgtggacagtgtctgtgtgtatatctgtacatagatatagacacacactttaaaagacttaccaagcactttttaaaagaagaaactattttgcagtcctcccctacccactccctgcccttcccactgcagagatgacatcccctcttctcccactggccttttggcagagaatctggttctgtctcttttttaatgtaggaactaactatttttaacttcttcctggggcctgagcagggaagggtgggactggaaggcactaaggggaagggagaagccctcaggcgaggccctgctccccctacctccttgccagggcaagggtggagtgtggaagacgtgggtcccccagagcaggcctggcccccagctgtgagggcctcagggaggcccgagggggagtgctgggggtctcagctggcttagctcctaagtttaccaaatgttaatttagtcttggggagaacagcaagggctggaggcagtgctgcagggccagccccactcctgacacctgggcccttgaagctccttgaggggcaaggccaggagttccagccctcaggttcctgagggtccaccctcagtccttccccccgccgcccctccccggactccccacaagagcctccctggccccagggcgcctaccaggctggtactcattctatgaccaccgcccccaaccagctgcccccagctctccctgccccctcccctctctggcagctagcagggcaattggcggggaggagtgcggactgaggactgaggaccaagggggcccaggcctgccctcctaccggaggggctgccgtttgcattccttggtgctctctgagtgcagctggtgtcccgccctgttctgggcgcacgtctgtgtgcgtgtgtgtgtgcctgtccagtgtatattgtgtcttagcttccattttaaaaattgttctgtacagagagagatgcagcaggggcgggagggcagagtgggcggaggggagcagccgcacccccagcaccgggtgtctgcggtaggaacaagagggctgagagggtctggtcctggcccaggctccccctgtggctcagcacgaaagggctttcaatgaattaagtgaaaactttttccttttttacaaaaatgcaaaaatcaacaaagctccaaacctattggaaataaaatatgaacttgcagtggta

SEQ ID NO: 1255 - DNA, 178 bp, Homo sapiens
ccagcccagcccaggaggtggtctgacagacgcatccggtcgggtcgcgtaacagacagagtgctgctgggacactgtcctgactgcagcgaggggctgagatgtgcctgaggtttgactattacctttttatacgagaacctaaagctagcaagttaaccttttcatgcctcggttt

SEQ ID NO: 1256 - DNA, 510 bp, Homo sapiens
tacaactatctgatgacaatattcttcattcttgtaagctcagttaacatcttttcacttcccatctgataagtgctagctgctgatttttttgctcagtatctccatttatatcaatttattttcatctctagagcagcgcatcaggctgctctctcgtgaatatattgttacttttttctggcactggaatatacaactatccatgacagcaaaatttgagggccatattgagatcaccggctgatatggtgaccatgtaaatataagtttaaattgcttagttccacgttagaatagtttaatcaatttctgtcccagaaactggatatgaaacaggttagatgaggaagcttatatggaaaaaaattatctttcatcctctccacatatacatttttcctgagactaggtcatatgtatattcattttgtacacattggggaattggcatagtaatttattcaacaaacattaattagcaccttactttgtgacaaatctgtaaaa

SEQ ID NO: 1257 - DNA, 510 bp, Homo sapiens; identical to SEQ ID NO: 1256

SEQ ID NO: 1258 - DNA, 509 bp, Homo sapiens
tacaactatctgatgacaatattcttcattcttgtaagctcagttaacatcttttcacttcccatctgataagtgctagctgctgatttttttgctcagtatctccatttatatcaatttattttcatctctagagcagcgcatcaggctgctctctcgtgaatatattgttacttttttctggcactggaatatacaactatccatgacagcaaaatttgagggccatattgagatcaccggctgatatgctgaccatgtaaatataagtttaaattgcttagttccacgttagaatagtttaatcaatttctgtcccagaaactggatatgaaacaggttagatgaggaagcttatatggaaaaaaattatctttcatcctctccacatatacatttttcctgagactaggtcatatgtatattcattttgtacacattggggaattggcatagtaatttattcaacaaacattaattagcaccttacttgtgacaaatctgtaaaa

SEQ ID NO: 1259 - DNA, 506 bp, Homo sapiens
tacaactatctgatgacaatattcttcattcttgtaagctcagttaacatcttttcacttcccatctgataagtgctagctgctgatttttttgctcagtatctccatttatatcaatttattttcatctctagagcagcgcatcaggctgctctctcgtgaatatattgttacttttttctggcactggaatatacaactatccatgacagcaaaatttgagggccatattgagatcaccggctgatatgctgaccatgtaaatataagtttaaattgcttagttccacgttagaatagtttaatcaatttctgtcccagaaactggatatgaaacaggttagatgaggaagcttatatggaaaaaaattatctttcatcctctccacatatacatttttcctgagactaggtcatatgtatattcattttgtacacattggggaattggcatagtaatttattcaacaaacattaattagcaccttactttgtgacaaatctgt

SEQ ID NO: 1260 - DNA, 610 bp, Homo sapiens
acagaatgtagcagaagagtattatgaaaatgagaacattgaaagataatgttgatgcttgattctttcacttaataaggtgtctgagtatttaatgattttgttttgtagttcaattaccgtagaacaatctacttaacgctagattgtctgtcgggaccatgatgattctcaaataaatattgtatttaccaattctactcttaatttttttaaaactaaagacaagacaaaaaagtagatgtctctataatacatttatatgaaattaaattttcttagtttatttttgctttagaatgccagttgtaatcaaaggaccattggcaagacactggccattagtaaggcatcaaactttgagctttgctttactttaaaaaagttataccatgcaaggatagaagtagacataggcattcacataatcccctgtacatcctccagaggggttttgtcagatgaatttcccccaaagggcctcttagttaccatcagcttctctttgggacatatatatttctgactgtggtcatttgttaaggagaagtttagcagacgttattaatcaaatacatttaagagagctattgcttttcactttctccca

SEQ ID NO: 1261 - DNA, 610 bp, Homo sapiens; identical to SEQ ID NO: 1260

SEQ ID NO: 1262 - DNA, 231 bp, Homo sapiens
ccttcttatatactaatactaacagtttaagaacttaaatctctttttcccctagtgggattcttattcctttctttttcttcaatgtttgagttcaggggtacatgtgcagaatgtgcaagtttgttacataggtaaacatgtgccatggtggtttgctgcacagatcaacccaccacctaggtattaaacctggcatccattagttattcttcctgatgctctccctcc

SEQ ID NO: 1263 - DNA, 610 bp, Homo sapiens; identical to SEQ ID NO: 1260

SEQ ID NO: 1264 - DNA, 231 bp, Homo sapiens
ccttcttatatactaatactaacagtttaagaacttaaatctctttttcccctagtgggattcttattcctttctttttcttcaatgtttgagttcaggggtacatgtgcagaatgtgcaagtttgttacataggtaaacatgtgccacggtggtttgctgcacagatcaacccaccacctaggtattaaacctggcatccattagttattcttcctgatgctctccctcc

SEQ ID NO: 1265 - DNA, 610 bp, Homo sapiens; identical to SEQ ID NO: 1260

SEQ ID NO: 1266 - DNA, 405 bp, Homo sapiens
aagtgtttcataacaatggcctcggctagcaatatacccattttccagatgaaaagctagacaggggccaagattaaagccctctaatcaatctgactccactcataatctcttctcattcattacactacagaaagatgaaaggacttgcacaaagtcacctagtcaacaagtggcagtgtaagatttgtgccaagtctacttttcaattaaccctgtggctttccattcttcatgtctgagcactgtgtcccttgctgcacagcctggtgtccagaactcagcaggcattcaataaacacttgaagaactgaattggcttgaatgagatggtttgctatctatttcctctatcctcatgggaaaagagaagaaatcttacagactgaagtaaaggattagact

SEQ ID NO: 1267 - DNA, 451 bp, Homo sapiens
tgagatggagtctcaccctttcgcccaggctggagtgcagtcgtccaggcttgactcactgcaacctccacctcccaggttcaagagattctcctgcctcagcttcctgagtacctgagattacaggcccccgccaccacacccagctaattttagtatttttattagagatggagtttcactatgttggccaggttggtctcgaactcctgacctcaagtgatctgcccacctcagccttcctcccaaagtgctgggattacaggcatgagccactgcgccgggcccatattttctttataaacaaagctggctgactcctatagagtagatcctgaactggagggggaaatgctataaaggacattacaagctgatctgacaaaatttgaatatggatggtagattaaagtcatgtatcagtctacaattttgaagttgataactgtat

What is claimed is:

1. An isolated nucleic acid molecule comprising a polynucleotide having a nucleotide sequence at least 95% identical to a sequence selected from the group consisting of:
(a) a polynucleotide fragment of SEQ ID NO: X or a polynucleotide fragment of the cDNA sequence contained in Clone ID NO:Z, which is hybridizable to SEQ ID NO: X;
(b) a polynucleotide encoding a polypeptide fragment of SEQ ID NO: Y or a polypeptide fragment encoded by the cDNA sequence contained in cDNA Clone ID NO:Z, which is hybridizable to SEQ ID NO: X;
(c) a polynucleotide encoding a polypeptide fragment of a polypeptide encoded by SEQ ID NO: X or a polypeptide fragment encoded by the cDNA sequence contained in cDNA Clone ID NO:Z, which is hybridizable to SEQ ID NO: X;
(d) a polynucleotide encoding a polypeptide domain of SEQ ID NO: Y or a polypeptide domain encoded by the cDNA sequence contained in cDNA Clone ID NO:Z, which is hybridizable to SEQ ID NO: X;
(e) a polynucleotide encoding a polypeptide epitope of SEQ ID NO: Y or a polypeptide epitope encoded by the cDNA sequence contained in cDNA Clone ID NO:Z, which is hybridizable to SEQ ID NO: X;
(f) a polynucleotide encoding a polypeptide of SEQ ID NO: Y or the cDNA sequence contained in cDNA Clone ID NO:Z, which is hybridizable to SEQ ID NO: X, having biological activity;
(g) a polynucleotide which is a variant of SEQ ID NO: X;
(h) a polynucleotide which is an allelic variant of SEQ ID NO: X;
(i) a polynucleotide which encodes a species homologue of the SEQ ID NO: Y;
(j) a polynucleotide capable of hybridizing under stringent conditions to any one of the polynucleotides specified in (a)-(i), wherein said polynucleotide does not hybridize under stringent conditions to a nucleic acid molecule having a nucleotide sequence of only A residues or of only T residues.

2. The isolated nucleic acid molecule of claim 1, wherein the polynucleotide fragment comprises a nucleotide sequence encoding a protein.

3. The isolated nucleic acid molecule of claim 1, wherein the polynucleotide fragment comprises a nucleotide sequence encoding the sequence identified as SEQ ID NO: Y or the polypeptide encoded by the cDNA sequence contained in cDNA Clone ID NO:Z, which is hybridizable to SEQ ID NO: X.

4. The isolated nucleic acid molecule of claim 1, wherein the polynucleotide fragment comprises the entire nucleotide sequence of SEQ ID NO: X or the cDNA sequence contained in cDNA Clone ID NO:Z, which is hybridizable to SEQ ID NO: X.

5. The isolated nucleic acid molecule of claim 2, wherein the nucleotide sequence comprises sequential nucleotide deletions from either the C-terminus or the N- terminus.

6. The isolated nucleic acid molecule of claim 3, wherein the nucleotide sequence comprises sequential nucleotide deletions from either the C-terminus or the N- terminus.

7. A recombinant vector comprising the isolated nucleic acid molecule of claim 1.

8. A method of making a recombinant host cell comprising the isolated nucleic acid molecule of claim 1.

9. A recombinant host cell produced by the method of claim 8.

10. The recombinant host cell of claim 9 comprising vector sequences.

11. An isolated polypeptide comprising an amino acid sequence at least 90% identical to a sequence selected from the group consisting of:
(a) a polypeptide fragment of SEQ ID NO: Y or the encoded sequence contained in cDNA Clone ID NO:Z;
(b) a polypeptide fragment of SEQ ID NO: Y or the encoded sequence contained in cDNA Clone ID NO:Z, having biological activity;
(c) a polypeptide domain of SEQ ID NO: Y or the encoded sequence contained in cDNA Clone ID NO:Z;
(d) a polypeptide epitope of SEQ ID NO: Y or the encoded sequence contained in cDNA Clone ID NO:Z;
(e) a full length protein of SEQ ID NO: Y or the encoded sequence contained in cDNA Clone ID NO:Z;
(f) a variant of SEQ ID NO: Y;
(g) an allelic variant of SEQ ID NO: Y; or
(h) a species homologue of the SEQ ID NO: Y.

12. The isolated polypeptide of claim 11, wherein the full length protein comprises sequential amino acid deletions from either the C-terminus or the N-terminus.

13. An isolated antibody that binds specifically to the isolated polypeptide of claim 11.

14. A recombinant host cell that expresses the isolated polypeptide of claim 11.

15. A method of making an isolated polypeptide comprising:
(a) culturing the recombinant host cell of claim 14 under conditions such that said polypeptide is expressed; and
(b) recovering said polypeptide.

16. The polypeptide produced by claim 15.

17. A method for preventing, treating, or ameliorating a medical condition, comprising administering to a mammalian subject a therapeutically effective amount of the polynucleotide of claim 1.

18. A method of diagnosing a pathological condition or a susceptibility to a pathological condition in a subject comprising:
(a) determining the presence or absence of a mutation in the polynucleotide of claim 1; and
(b) diagnosing a pathological condition or a susceptibility to a pathological condition based on the presence or absence of said mutation.

19. A method of diagnosing a pathological condition or a susceptibility to a pathological condition in a subject comprising:
(a) determining the presence or amount of expression of the polypeptide of claim 11 in a biological sample; and
(b) diagnosing a pathological condition or a susceptibility to a pathological condition based on the presence or amount of expression of the polypeptide.

20. A method for identifying a binding partner to the polypeptide of claim 11 comprising:
(a) contacting the polypeptide of claim 11 with a binding partner; and
(b) determining whether the binding partner effects an activity of the polypeptide.

21. The gene corresponding to the cDNA sequence of SEQ ID NO: Y.

22. A method of identifying an activity in a biological assay, wherein the method comprises:
(a) expressing SEQ ID NO: X in a cell;
(b) isolating the supernatant;
(c) detecting an activity in a biological assay; and
(d) identifying the protein in the supernatant having the activity.

23. The product produced by the method of claim 20.

24. A method for preventing, treating, or ameliorating a medical condition, comprising administering to a mammalian subject a therapeutically effective amount of the polypeptide of claim 11.
